(19) United States
(12) Patent Application Publication
(10) Pub. No.: US 2021/0261955 A1
(43) Pub. Date: Aug. 26, 2021

(54) COMPOSITIONS AND METHODS FOR TREATING HEMOGLOBINOPATHIES

(71) Applicant: Beam Therapeutics Inc., Cambridge, MA (US)

(72) Inventors: Ian SLAYMAKER, Cambridge, MA (US); Nicole GAUDELLI, Cambridge, MA (US); Yi YU, Cambridge, MA (US); Bernd ZETSCHE, Cambridge, MA (US); David A. BORN, Cambridge (US); Seung-Joo LEE, Cambridge, MA (US); Michael PACKER, Cambridge, MA (US)

(73) Assignee: Beam Therapeutics Inc., Cambridge, MA (US)

(21) Appl. No.: 17/214,461

(22) Filed: Mar. 26, 2021

Related U.S. Application Data
(63) Continuation of application No. PCT/US2020/018193, filed on Feb. 13, 2020.
(60) Provisional application No. 62/805,271, filed on Feb. 13, 2019.
(60) Provisional application No. 62/805,277, filed on Feb. 13, 2019.
(60) Provisional application No. 62/852,224, filed on May 23, 2019.
(60) Provisional application No. 62/852,228, filed on May 23, 2019.
(60) Provisional application No. 62/931,722, filed on Nov. 6, 2019.
(60) Provisional application No. 62/931,747, filed on Nov. 6, 2019.
(60) Provisional application No. 62/941,569, filed on Nov. 27, 2019.
(60) Provisional application No. 62/966,526, filed on Jan. 27, 2020.

(51) Int. Cl. C12N 15/11; C12N 9/22; C12N 9/78; C12N 15/90; C07K 14/47; C12N 5/078; A61K 35/18

(52) U.S. Cl. CPC C12N 15/11; C12N 9/22; C12N 9/78; C12Y 305/04004; C12N 2510/00; C07K 14/4717; C12N 5/0641; A61K 35/18; C12N 2310/20; C12N 15/907

(57) ABSTRACT

The present invention features compositions and methods for editing deleterious mutations associated with hemoglobinopathies, such as sickle cell disease (SCD). In particular embodiments, the invention provides methods for correcting mutations in a beta globin polynucleotide using modified adenosine base editors termed “ABE8” having unprecedented levels (e.g., >60-70%) of efficiency.

### CROSS REFERENCE TO RELATED APPLICATIONS

[0001] This application is a U.S. National Stage filed under 35 U.S.C. § 111(a), which is a continuation of and claims priority to International Application No. PCT/US2020/018193, filed on Feb. 13, 2020, which claims priority to and benefit of U.S. Provisional Application Nos. 62/805,271 filed Feb. 13, 2019; 62/805,277, filed Feb. 13, 2019; 62/852,224, filed May 23, 2019; 62/852,228, filed May 23, 2019; 62/931,722, filed Nov. 6, 2019; 62/931,747, filed Nov. 6, 2019; 62/941,569, filed Nov. 27, 2019; and 62/966,526, filed Jan. 27, 2020, the contents of all of which are incorporated by reference herein in their entireties.

### SEQUENCE LISTING

[0002] The instant application contains a Sequence Listing which has been submitted electronically in ASCII format and is hereby incorporated by reference in its entirety. Said ASCII copy, created on Apr. 30, 2021, is named 180802.042104_US_SL.txt and is 838,729 bytes in size.

### INCORPORATION BY REFERENCE

[0003] All publications, patents, and patent applications mentioned in this specification are herein incorporated by reference to the same extent as if each individual publication, patent, or patent application was specifically and individually indicated to be incorporated by reference. Absent any indication otherwise, publications, patents, and patent applications mentioned in this specification are incorporated herein by reference in their entireties.

### BACKGROUND OF THE INVENTION

[0004] Sickle cell disease (SCD) is a group of disorders that affects hemoglobin, the molecule in red blood cells that delivers oxygen to cells throughout the body. People with this disorder have atypical hemoglobin molecules, which can distort red blood cells into a sickle, or crescent, shape. The clinical manifestations of sickle cell disease (SCD) result from intermittent episodes of microvascular occlusion leading to tissue ischemia/reperfusion injury and chronic hemolysis. Vaso-occlusive events are associated with ischemia/reperfusion damage to tissues resulting in pain and acute or chronic injury affecting any organ system. The bones/marrow, spleen, liver, brain, lungs, kidneys, and joints are often affected.

[0005] SCD is a genetic disorder characterized by the presence of at least one hemoglobin S allele (HbS; p.Glu6Val in HBB) and a second HBB pathogenic variant resulting in abnormal hemoglobin polymerization. HbS/S (homozygous p.Glu6Val in HBB) accounts for 60%-70% of SCD in the United States. The life expectancy for men and women suffering from SCD is only 42 and 48 years, respectively. Current methods of treatment are focused on managing the symptoms of the disease. Methods for editing the genetic mutations that cause SCD and other hemoglobinopathies are urgently required.

### SUMMARY

[0006] As described below, the present invention features compositions and methods for editing deleterious mutations associated with sickle cell disease (SCD). In particular embodiments, the invention provides for the correction of SCD mutations using a modified adenosine deaminase base editor termed “ABE8” having unprecedented levels (e.g., >60-70%) of efficiency.

[0007] In one aspect, the invention features a method of editing a beta globin polynucleotide comprising a single nucleotide polymorphism (SNP) associated with sickle cell disease, the method comprising contacting a beta globin polynucleotide with one or more guide RNAs and a fusion protein comprising a polynucleotide programmable DNA binding domain and at least one base editor domain that is an adenosine deaminase variant comprising an alteration at amino acid position 82 and/or 166 of

MSEVEFSHEYWMRHALTLAKRARDEREVPVGAVLVLNNRVIGEGWNRAIGLHDPTAHAEIMALRQGGLVM QNYRLIDATLYVTFEPCVMCAGAMIHSRIGRVVFGVRNAKTGAAGSLMDVLHYPGMNHRVEITEGILADE CAALLCYFFRMPRQVFNAQKKAQSSTD (SEQ ID NO: 2), wherein the guide RNA targets the base editor to effect an alteration of the SNP associated with sickle cell disease.

[0008] In another aspect, the invention features a method of editing a beta globin (HBB) polynucleotide comprising a single nucleotide polymorphism (SNP) associated with sickle cell disease, the method comprising contacting a beta globin polynucleotide with one or more guide RNAs and a fusion protein comprising a polynucleotide programmable DNA binding domain comprising the following sequence:

(SEQ ID NO: 3)
EIGKATAKYFFYSNIMNFFKTEITLANGEIRKRPLIETNGETGEIVWDK
GRDFATVRKVLSMPQVNIVKKTEVQTGGFSKESILPKRNSDKLIARKKD
WDPKKYGGFMQPTVAYSVLVVAKVEKGKSKKLKSVKELLGITIMERSSF
EKNPIDFLEAKGYKEVKKDLIIKLPKYSLFELENGRKRMLASAKFLQKG
NELALPSKYVNFLYLASHYEKLKGSPEDNEQKQLFVEQHKHYLDEIIEQ
ISEFSKRVILADANLDKVLSAYNKHRDKPIREQAENIIHLFTLTNLGAP
RAFKYFDTTIARKEYRSTKEVLDATLIHQSITGLYETRIDLSQLGGDGG
SGGSGGSGGSGGSGGSGGMDKKYSIGLAIGTNSVGWAVITDEYKVPSKK
FEWLGNTDRHSIKKNLIGALLFDSGETAEATRLKRTARRRYTRRKNRIC
YLQEIFSNEMAKVDDSFFHRLEESFLVEEDKKHERHPIFGNIVDEVAYH
EKYPTIYHLRKKLVDSTDKADLRLIYLALAHMIKFRGHFLIEGDLNPDN
SDVDKLFIQLVQTYNQLFEENPINASGVDAKAILSARLSKSRRLENLIA
QLPGEKKNGLFGNLIALSLGLTPNFKSNFDLAEDAKLQLSKDTYDDDLD
NLLAQIGDQYADLFLAAKNLSDAILLSDILRVNTEITKAPLSASMIKRY
DEHHQDLTLLKALVRQQLPEKYKEIFFDQSIMGYAGYIDGGASQEEFYK
FIKPILEKMDGTEELLVKLNREDLLRKQRTFDNGSIPHQIHLGELHAIL
RRQEDFYPFLKDNREKIEKILTFRIPYYVGPLARGNSRFAWMTRKSEET
ITPWNFEEVVDKGASAQSFIERMTNFDKNLPNEKVLPKHSLLYEYFTVY
NELTKVKYVTEGMRKPAFLSGEQKKAIVDLLFKTNRKVTVKQLKEDYFK
KIECFDSVEISGVEDRFNASLGTYHDLLKIIKDKDFLDNEENEDILEDI
VLTLTLFEDREMIEERLKTYAHLFDDKVMKQLKRRRYTGWGRLSRKLIN
GIRDKQSGKTILDFLKSDGFANRNFMQLIHDDSLTFKEDIQKAQVSGQG
DSLHEHIANLAGSPAIKKGILQTVKVVDELVKVMGRHKPENIVIEMARE
NQTTQKGQKNSRERMKRIEEGIKELGSQILKEHPVENTQLQNEKLYLYY
LQNGRDMYVDQELDINRLSDYDVDHIVPQSFLKDDSIDNKVLTRSDKNR
GKSDNVPSEEVVKKMKNYWRQLLNAKLITQRKFDNLTKAERGGLSELDK
AGFIKRQLVETRQITKHVAQILDSRMNTKYDENDKLIREVKVITLKSKL
VSDFRKDFQFYKVREINNYHHAHDAYLNAVVGTALIKKYPKLESEFVYG
DYKVYDVRKMIAKSEQEGADKRTADGSEFESPKKKRKV*,

wherein the bold sequence indicates sequence derived from Cas9, the italics sequence denotes a linker sequence, and the underlined sequence denotes a bipartite nuclear localization sequence, and at least one base editor domain comprising an adenosine deaminase variant comprising an alteration at amino acid position 82 and/or 166 of MSEVEFSHEYWMRHALTLAKRARDEREVPVGAVLVLNNRVIGEGWNRAIGLHDPTAHAEIMALRQGGLVM QNYRLIDATLYVTFEPCVMCAGAMIHSRIGRVVFGVRNAKTGAAGSLMDVLHYPGMNHRVEITEGILADE CAALLCYFFRMPRQVFNAQKKAQSSTD (SEQ ID NO: 2).

[0009] In another aspect, the invention features a base editing system comprising the fusion protein of any previous aspect or otherwise described herein and a guide RNA comprising a nucleic acid sequence selected from the following CUUCUCCACAGGAGUCAGAU (SEQ ID NO: 4); ACUUCUCCACAGGAGUCAGAU (SEQ ID NO: 5); and GACUUCUCCACAGGAGUCAGAU (SEQ ID NO: 6). In one embodiment, the gRNA further contains a nucleic acid sequence GUUUUUGUACUCUCAAGAUUUAAGUAACUGUACAACGAAACUUACACAGUUACUUAAAUCUUGCAGAAGC UACAAAGAUAAGGCUUCAUGCCGAAAUCAACACCCUGUCAUUUUAUGGCAGGGUG (SEQ ID NO: 7).

In another embodiment, the gRNA contains a nucleic acid sequence selected from CUUCUCCACAGGAGUCAGAUGUUUUUGUACUCUCAAGAUUUAAGUAACUGUACAACGAAACUUACACAGU UACUUAAAUCUUGCAGAAGCUACAAAGAUAAGGCUUCAUGCCGAAAUCAACACCCUGUCAUUUUAUGGCA GGGUG (SEQ ID NO: 8);

### ACUUCUCCACAGGAGUCAGAUGUUUUUGUACUCUCAAGAUUUAAGUAACUGUACAACGAAACUUACACAG UUACUUAAAUCUUGCAGAAGCUACAAAGAUAAGGCUUCAUGCCGAAAUCAACACCCUGUCAUUUUAUGGC AGGGUG (SEQ ID NO: 9); and

### GACUUCUCCACAGGAGUCAGAUGUUUUUGUACUCUCAAGAUUUAAGUAACUGUACAACGAAACUUACACA GUUACUUAAAUCUUGCAGAAGCUACAAAGAUAAGGCUUCAUGCCGAAAUCAACACCCUGUCAUUUUAUGG CAGGGUG (SEQ ID NO: 10).

[0010] In another aspect, the invention features a cell produced by introducing into the cell, or a progenitor thereof: a base editor, a polynucleotide encoding the base editor, to the cell, wherein the base editor comprises a polynucleotide programmable DNA binding domain and an adenosine deaminase domain described in any aspect described herein; and one or more guide polynucleotides that target the base editor to effect an A•T to G•C alteration of the SNP associated with sickle cell disease. In one embodiment, the cell produced is a hematopoietic stem cell, a common myeloid progenitor, proerythroblast, erythroblast, reticulocyte, or erythrocyte. In another embodiment, the cell or progenitor thereof is a hematopoietic stem cell, a common myeloid progenitor, proerythroblast, or erythroblast. In another embodiment, the hematopoietic stem cell is a CD34⁺ cell. In another embodiment, the cell is from a subject having sickle cell disease. In another embodiment, the cell is a mammalian cell or human cell.

[0011] In another aspect, the invention features a method of treating sickle cell disease in a subject comprising administering to the subject a cell of any previous aspect or any other aspect of the invention delineated herein. In one embodiment, the cell is autologous to the subject. In another embodiment, the cell is allogenic to the subject.

[0012] In another aspect, the invention provides an isolated cell or population of cells propagated or expanded from the cell of any previous aspect or any other aspect of the invention delineated herein.

[0013] In another aspect, the invention provides a method of producing a red blood cell, or progenitor thereof, involving introducing into a red blood cell progenitor comprising an SNP associated with sickle cell disease, a base editor, or a polynucleotide encoding the base editor, wherein the base editor comprises a polynucleotide-programmable nucleotide-binding domain and an adenosine deaminase variant domain described in any previous aspect; and one or more guide polynucleotides, wherein the one or more guide polynucleotides target the base editor to effect an A•T to G•C alteration of the SNP associated with sickle cell disease; and differentiating the red blood cell progenitor into an erythrocyte. In one embodiment, the method involves differentiating the red blood cell progenitor into one or more of a hematopoietic stem cell, a common myeloid progenitor, proerythroblast, erythroblast, reticulocyte, or erythrocyte. In one embodiment, the method involves the red blood cell progenitor is a CD34⁺ cell. In another embodiment, the red blood cell progenitor is obtained from a subject having sickle cell disease. In another embodiment, the red blood cell progenitor is a mammalian cell or human cell. In another embodiment, the A•T to G•C alteration at the SNP associated with sickle cell disease changes a valine to an alanine in the HBB polypeptide. In another embodiment, the SNP associated with sickle cell disease results in expression of an HBB polypeptide having a valine at amino acid position 6. In another embodiment, the SNP associated with sickle cell disease substitutes a glutamic acid with a valine. In another embodiment, the cell is selected for the A•T to G•C alteration of the SNP associated with sickle cell disease. In another embodiment, the polynucleotide programmable DNA binding domain comprises a modified Staphylococcus aureus Cas9 (SaCas9), Streptococcus thermophilus 1 Cas9 (St1Cas9), a modified Streptococcus pyogenes Cas9 (SpCas9), or variants thereof.

[0014] In various embodiments of any of the above aspects or any other aspect of the invention described herein, the adenosine deaminase variant comprises alterations at amino acid position 82 and 166. In various embodiments of any of the above aspects or any other aspect of the invention described herein, the adenosine deaminase variant comprises a V82S alteration. In various embodiments of any of the above aspects or any other aspect of the invention described herein, the adenosine deaminase variant comprises a T166R alteration. In various embodiments of any of the above aspects or any other aspect of the invention described herein, the adenosine deaminase variant comprises V82S and T166R alterations. In various embodiments of any of the above aspects or any other aspect of the invention described herein, the adenosine deaminase variant further comprises one or more of the following alterations: Y147T, Y147R, Q154S, Y123H, and Q154R. In various embodiments of any of the above aspects or any other aspect of the invention described herein, the adenosine deaminase variant comprises a combination of alterations selected from the following: Y147T+Q154R; Y147T+Q154S; Y147R+Q154S; V82S+Q154S; V82S+Y147R; V82S+Q154R; V82S+Y123H; I76Y+V82S; V82S+Y123H+Y147T; V82S+Y123H+Y147R; V82S+Y123H+Q154R; Y147R+Q154R+Y123H; Y147R+Q154R+I76Y; Y147R+Q154R+T166R; Y123H+Y147R+Q154R+I76Y; V82S+Y123H+Y147R+Q154R; or I76Y+V82S+Y123H+Y147R+Q154R. In an embodiment of the above-delineated aspects, the adenosine deaminase variant comprises Y147R+Q154R+Y123H. In an embodiment of the above-delineated aspects, the adenosine deaminase variant comprises Y147R+Q154R+I76Y. In an embodiment of the above-delineated aspects, the adenosine deaminase variant comprises Y147R+Q154R+T166R. In an embodiment of the above-delineated aspects, the adenosine deaminase variant comprises Y147T+Q154R. In an embodiment of the above-delineated aspects, the adenosine deaminase variant comprises Y147T+Q154S. In an embodiment of the above-delineated aspects, the adenosine deaminase variant comprises Y147R+Q154S. In an embodiment of the above-delineated aspects, the adenosine deaminase variant comprises V82S+Q154S. In an embodiment of the above-delineated aspects, the adenosine deaminase variant comprises V82S+Y147R. In an embodiment of the above-delineated aspects, the adenosine deaminase variant comprises V82S+Q154R. In an embodiment of the above-delineated aspects, the adenosine deaminase variant comprises V82S+Y123H. In an embodiment of the above-delineated aspects, the adenosine deaminase variant comprises I76Y+V82S. In an embodiment of the above-delineated aspects, the adenosine deaminase variant comprises V82S+Y123H+Y147T. In an embodiment of the above-delineated aspects, the adenosine deaminase variant comprises V82S+Y123H+Y147R. In an embodiment of the above-delineated aspects, the adenosine deaminase variant comprises V82S+Y123H+Q154R. In an embodiment of the above-delineated aspects, the adenosine deaminase variant comprises Y123H+Y147R+Q154R+I76Y. In an embodiment of the above-delineated aspects, the adenosine deaminase variant comprises V82S+Y123H+Y147R+Q154R. In an embodiment of the above-delineated aspects, the adenosine deaminase variant comprises I76Y+V82S+Y123H+Y147R+Q154R. In other embodiments of the above aspects, the adenosine deaminase variant comprises a deletion of the C terminus beginning at a residue selected from the group consisting of 149, 150, 151, 152, 153, 154, 155, 156, and 157.

[0015] In various embodiments of any of the above aspects or any other aspect of the invention described herein, the cell is in vivo or ex vivo. In various embodiments of any of the above aspects or any other aspect of the invention described herein, the A•T to G•C alteration at the SNP associated with sickle cell disease changes a valine to an alanine in the HBB polypeptide. In various embodiments of any of the above aspects or any other aspect of the invention described herein, the SNP associated with sickle cell disease results in expression of an HBB polypeptide having a valine at amino acid position 6. In various embodiments of any of the above aspects or any other aspect of the invention described herein, the SNP associated with sickle cell disease substitutes a glutamic acid with a valine. In various embodiments of any of the above aspects or any other aspect of the invention described herein, the A•T to G•C alteration at the SNP associated with sickle cell disease results in expression of an HBB polypeptide having an alanine at amino acid position 6. In various embodiments of any of the above aspects or any other aspect of the invention described herein, the A•T to G•C alteration at the SNP associated with sickle cell disease substitutes a glutamic acid with an alanine.

[0016] In various embodiments of any of the above aspects or any other aspect of the invention described herein, the polynucleotide programmable DNA binding domain is a modified Staphylococcus aureus Cas9 (SaCas9), Streptococcus thermophilus 1 Cas9 (St1Cas9), a modified Streptococcus pyogenes Cas9 (SpCas9), or variants thereof. In various embodiments of any of the above aspects or any other aspect of the invention described herein, the polynucleotide programmable DNA binding domain comprises a variant of SpCas9 having an altered protospacer-adjacent motif (PAM) specificity or specificity for a non-G PAM. In various embodiments of any of the above aspects or any other aspect of the invention described herein, the altered PAM has specificity for the nucleic acid sequence 5′-NGC-3′. In various embodiments of any of the above aspects or any other aspect of the invention described herein, the modified SpCas9 comprises amino acid substitutions D1135M, S1136Q, G1218K, E1219F, A1322R, D1332A, R1335E, and T1337R, or corresponding amino acid substitutions thereof. In various embodiments of any of the above aspects or any other aspect of the invention described herein, the polynucleotide programmable DNA binding domain is a nuclease inactive or nickase variant. In various embodiments of any of the above aspects or any other aspect of the invention described herein, the nickase variant comprises an amino acid substitution D10A or a corresponding amino acid substitution thereof. In various embodiments of any of the above aspects or any other aspect of the invention described herein, the base editor further comprises a zinc finger domain. In various embodiments of any of the above aspects or any other aspect of the invention described herein, the zinc finger domain comprises recognition helix sequences RNEHLEV (SEQ ID NO: 11), QSTTLKR (SEQ ID NO: 12), and RTEHLAR (SEQ ID NO: 13) or recognition helix sequences RGEHLRQ (SEQ ID NO: 14), QSGTLKR (SEQ ID NO: 15), and RNDKLVP (SEQ ID NO: 16). In various embodiments of any of the above aspects or any other aspect of the invention described herein, the zinc finger domain is one or more of zflra or zflrb. In various embodiments of any of the above aspects or any other aspect of the invention described herein, the adenosine deaminase domain is capable of deaminating adenine in deoxyribonucleic acid (DNA). In various embodiments of any of the above aspects or any other aspect of the invention described herein, the one or more guide RNAs comprises a CRISPR RNA (crRNA) and a trans-encoded small RNA (tracrRNA), wherein the crRNA comprises a nucleic acid sequence complementary to an HBB nucleic acid sequence comprising the SNP associated with sickle cell disease. In various embodiments of any of the above aspects or any other aspect of the invention described herein, the base editor is in complex with a single guide RNA (sgRNA) comprising a nucleic acid sequence complementary to an HBB nucleic acid sequence comprising the SNP associated with sickle cell disease. In various embodiments of any of the above aspects or any other aspect of the invention described herein, the A•T to G•C alteration at the SNP associated with sickle cell disease changes a valine to an alanine in the HBB polypeptide. In another embodiment, the SNP associated with sickle cell disease results in expression of an HBB polypeptide having a valine at amino acid position 6. In another embodiment, the SNP associated with sickle cell disease substitutes a glutamic acid with a valine. In another embodiment, the A•T to G•C alteration at the SNP associated with sickle cell disease results in expression of an HBB polypeptide having an alanine at amino acid position 6. In another embodiment, the A•T to G•C alteration at the SNP associated with sickle cell disease substitutes a glutamic acid with an alanine. In another embodiment, the cell is selected for the A•T to G•C alteration of the SNP associated with sickle cell disease. In another embodiment, the polynucleotide programmable DNA binding domain is a modified Staphylococcus aureus Cas9 (SaCas9), Streptococcus thermophilus 1 Cas9 (St1Cas9), a modified Streptococcus pyogenes Cas9 (SpCas9), or variants thereof.

[0017] In an aspect, a method for treating sickle cell disease (SCD) in a subject is provided, in which the method comprises administering to the subject a fusion protein comprising an adenosine deaminase variant inserted within a Cas9 or a Cas12 polypeptide, or a polynucleotide encoding the fusion protein thereof; and one or more guide polynucleotides to target the fusion protein to effect an A•T to G•C alteration of a single nucleotide polymorphism (SNP) associated with SCD, thereby treating SCD in the subject.

[0018] In another aspect, a method of treating sickle cell disease (SCD) in a subject is provided, in which the method comprises administering to the subject an adenosine base editor 8 (ABE8), or a polynucleotide encoding said base editor, wherein the ABE8 comprises an adenosine deaminase variant inserted within a Cas9 or Cas12 polypeptide; and one or more guide polynucleotides that target the ABE8 to effect an A•T to G•C alteration of a SNP associated with SCD, thereby treating SCD in the subject.

[0019] In an embodiment of the above-delineated methods, the ABE8 is selected from ABE8.1-m, ABE8.2-m, ABE8.3-m, ABE8.4-m, ABE8.5-m, ABE8.6-m, ABE8.7-m, ABE8.8-m, ABE8.9-m, ABE8.10-m, ABE8.11-m, ABE8.12-m, ABE8.13-m, ABE8.14-m, ABE8.15-m, ABE8.16-m, ABE8.17-m, ABE8.18-m, ABE8.19-m, ABE8.20-m, ABE8.21-m, ABE8.22-m, ABE8.23-m, ABE8.24-m, ABE8.1-d, ABE8.2-d, ABE8.3-d, ABE8.4-d, ABE8.5-d, ABE8.6-d, ABE8.7-d, ABE8.8-d, ABE8.9-d, ABE8.10-d, ABE8.11-d, ABE8.12-d, ABE8.13-d, ABE8.14-d, ABE8.15-d, ABE8.16-d, ABE8.17-d, ABE8.18-d, ABE8.19-d, ABE8.20-d, ABE8.21-d, ABE8.22-d, ABE8.23-d, or ABE8.24-d. In an embodiment of the above-delineated methods, the adenosine deaminase variant comprises the amino acid sequence of:

MSEVEFSHEYWMRHALTLAKRARDEREVPVGAVLVLNNRVIGEGWNRAIGLHDPTAH AEIMALRQGGLVMQNYRLIDATLYVTFEPCVMCAGAMIHSRIGRVVFGVRNAKTGAA GSLMDVLHYPGMNHRVEITEGILADECAALLCYFFRMPRQVFNAQKKAQSSTD (SEQ ID NO: 2) and wherein the amino acid sequence comprises at least one alteration. In an embodiment, the adenosine deaminase variant comprises alterations at amino acid position 82 and/or 166. In an embodiment, the at least one alteration comprises: V82S, T166R, Y147T, Y147R, Q154S, Y123H, and/or Q154R.
In an embodiment of the above-delineated methods, the adenosine deaminase variant comprises one of the following combination of alterations: Y147T+Q154R; Y147T+Q154S; Y147R+Q154S; V82S+Q154S; V82S+Y147R; V82S+Q154R; V82S+Y123H; I76Y+V82S; V82S+Y123H+Y147T; V82S+Y123H+Y147R; V82S+Y123H+Q154R; Y147R+Q154R+Y123H; Y147R+Q154R+I76Y; Y147R+Q154R+T166R; Y123H+Y147R+Q154R+I76Y; V82S+Y123H+Y147R+Q154R; and I76Y+V82S+Y123H+Y147R+Q154R. In an embodiment of the above-delineated methods, the adenosine deaminase variant is TadA*8.1, TadA*8.2, TadA*8.3, TadA*8.4, TadA*8.5, TadA*8.6, TadA*8.7, TadA*8.8, TadA*8.9, TadA*8.10, TadA*8.11, TadA*8.12, TadA*8.13, TadA*8.14, TadA*8.15, TadA*8.16, TadA*8.17, TadA*8.18, TadA*8.19, TadA*8.20, TadA*8.21, TadA*8.22, TadA*8.23, or TadA*8.24. In an embodiment, the adenosine deaminase variant comprises a deletion of the C terminus beginning at a residue selected from the group consisting of 149, 150, 151, 152, 153, 154, 155, 156, and 157. In an embodiment, the adenosine deaminase variant is an adenosine deaminase monomer comprising a TadA*8 adenosine deaminase variant domain. In an embodiment, the adenosine deaminase variant is an adenosine deaminase heterodimer comprising a wild-type adenosine deaminase domain and a TadA*8 adenosine deaminase variant domain. In an embodiment, the adenosine deaminase variant is an adenosine deaminase heterodimer comprising a TadA domain and a TadA*8 adenosine deaminase variant domain.

[0020] In an embodiment of the above-delineated methods, the SNP associated with SCD is located in the beta globin (HBB) gene. In an embodiment of the above-delineated methods, the SNP results in expression of an HBB polypeptide having a valine at amino acid position 6. In an embodiment of the above-delineated methods, the SNP substitutes a glutamic acid with a valine. In an embodiment of the above-delineated methods, the A•T to G•C alteration at the SNP changes a valine to an alanine in the HBB polypeptide. In an embodiment of the above-delineated methods, the A•T to G•C alteration at the SNP results in expression of an HBB polypeptide having an alanine at amino acid position 6. In an embodiment of the above-delineated methods, the A•T to G•C alteration at the SNP substitutes a glutamic acid with an alanine.

[0021] In an embodiment of the above-delineated methods, the adenosine deaminase variant is inserted within a flexible loop, an alpha helix region, an unstructured portion, or a solvent accessible portion of the Cas9 or Cas12 polypeptide. In an embodiment of the above-delineated methods, the adenosine deaminase variant is flanked by a N-terminal fragment and a C-terminal fragment of the Cas9 or Cas12 polypeptide. In an embodiment of the above-delineated methods, the fusion protein or ABE8 comprises the structure NH₂-[N-terminal fragment of the Cas9 or Cas12 polypeptide]-[adenosine deaminase variant]-[C-terminal fragment of the Cas9 or Cas12 polypeptide]-COOH, wherein each instance of “14” is an optional linker. In an embodiment, the C-terminus of the N terminal fragment or the N-terminus of the C terminal fragment comprises a part of a flexible loop of the Cas9 or the Cas12 polypeptide. In an embodiment, the flexible loop comprises an amino acid in proximity to the target nucleobase when the adenosine deaminase variant deaminates the target nucleobase.

[0022] In an embodiment of the above-delineated methods, the methods further comprise administering to the subject a guide nucleic acid sequence to effect deamination of the SNP target nucleobase associated with SCD. In an embodiment, the deamination of the SNP target nucleobase replaces the target nucleobase with a non-wild type nucleobase, and wherein the deamination of the target nucleobase ameliorates symptoms of sickle cell disease. In an embodiment, the deamination of the SNP associated with sickle cell disease substitutes a glutamic acid with an alanine.

[0023] In an embodiment of the above-delineated methods, the target nucleobase is 1-20 nucleobases away from a PAM sequence in the target polynucleotide sequence. In an embodiment, the target nucleobase is 2-12 nucleobases upstream of the PAM sequence. In an embodiment of the above-delineated methods, the N-terminal fragment or the C-terminal fragment of the Cas9 or Cas12 polypeptide binds the target polynucleotide sequence. In certain embodiments, the N-terminal fragment or the C-terminal fragment comprises a RuvC domain; the N-terminal fragment or the C-terminal fragment comprises a HNH domain; neither of the N-terminal fragment and the C-terminal fragment comprises an HNH domain; or neither of the N-terminal fragment and the C-terminal fragment comprises a RuvC domain. In an embodiment, the Cas9 or Cas12 polypeptide comprises a partial or complete deletion in one or more structural domains and wherein the deaminase is inserted at the partial or complete deletion position of the Cas9 or Cas12 polypeptide. In certain embodiments, the deletion is within a RuvC domain; the deletion is within an HNH domain; or the deletion bridges a RuvC domain and a C-terminal domain.

[0024] In an embodiment of the above-delineated methods, the fusion protein or ABE8 comprises a Cas9 polypeptide. In an embodiment, the Cas9 polypeptide is a Streptococcus pyogenes Cas9 (SpCas9), Staphylococcus aureus Cas9 (SaCas9), Streptococcus thermophilus 1 Cas9 (St1Cas9), or variants thereof. In an embodiment, the Cas9 polypeptide comprises the following amino acid sequence (Cas9 reference sequence):

(SEQ ID NO: 1)
[sequence omitted]

(single underline: HNH domain; double underline: RuvC domain; (Cas9 reference sequence), or a corresponding region thereof. In certain embodiments, the Cas9 polypeptide comprises a deletion of amino acids 1017-1069 as numbered in the Cas9 polypeptide reference sequence or corresponding amino acids thereof the Cas9 polypeptide comprises a deletion of amino acids 792-872 as numbered in the Cas9 polypeptide reference sequence or corresponding amino acids thereof; or the Cas9 polypeptide comprises a deletion of amino acids 792-906 as numbered in the Cas9 polypeptide reference sequence or corresponding amino acids thereof.
In an embodiment of the above-delineated methods, the adenosine deaminase variant is inserted within a flexible loop of the Cas9 polypeptide. In an embodiment, the flexible loop comprises a region selected from the group consisting of amino acid residues at positions 530-537, 569-579, 686-691, 768-793, 943-947, 1002-1040, 1052-1077, 1232-1248, and 1298-1300 as numbered in the Cas9 reference sequence, or corresponding amino acid positions thereof.

[0025] In an embodiment of the above-delineated methods, the deaminase variant is inserted between amino acid positions 768-769, 791-792, 792-793, 1015-1016, 1022-1023, 1026-1027, 1029-1030, 1040-1041, 1052-1053, 1054-1055, 1067-1068, 1068-1069, 1247-1248, or 1248-1249 as numbered in the Cas9 reference sequence, or corresponding amino acid positions thereof. In an embodiment of the above-delineated methods, the deaminase variant is inserted between amino acid positions 768-769, 792-793, 1022-1023, 1026-1027, 1040-1041, 1068-1069, or 1247-1248 as numbered in the Cas9 reference sequence or corresponding amino acid positions thereof. In an embodiment of the above-delineated methods, the deaminase variant is inserted between amino acid positions 1016-1017, 1023-1024, 1029-1030, 1040-1041, 1069-1070, or 1247-1248 as numbered in the Cas9 reference sequence or corresponding amino acid positions thereof. In an embodiment of the above-delineated methods, the adenosine deaminase variant is inserted within the Cas9 polypeptide at the loci identified in Table 14A. In an embodiment, the N-terminal fragment comprises amino acid residues 1-529, 538-568, 580-685, 692-942, 948-1001, 1026-1051, 1078-1231, and/or 1248-1297 of the Cas9 reference sequence, or corresponding residues thereof. In an embodiment, the C-terminal fragment comprises amino acid residues 1301-1368, 1248-1297, 1078-1231, 1026-1051, 948-1001, 692-942, 580-685, and/or 538-568 of the Cas9 reference sequence, or corresponding residues thereof.

[0026] In an embodiment of the above-delineated methods, the Cas9 polypeptide is a modified Cas9 and has specificity for an altered PAM or a non-G PAM. In an embodiment of the above-delineated methods, the Cas9 polypeptide is a nickase or wherein the Cas9 polypeptide is nuclease inactive. In an embodiment of the above-delineated methods, the Cas9 polypeptide is a modified SpCas9 polypeptide. In an embodiment, the modified SpCas9 polypeptide, which includes amino acid substitutions D1135M, S1136Q, G1218K, E1219F, A1322R, D1332A, R1335E, and T1337R (SpCas9-MQKFRAER) and which has specificity for the altered PAM 5′-NGC-3′.

[0027] In another embodiment of the above-delineated methods, the fusion protein or ABE8 comprises a Cas12 polypeptide. In an embodiment, the adenosine deaminase variant is inserted into the Cas12 polypeptide. In an embodiment, the Cas12 polypeptide is Cas12a, Cas12b, Cas12c, Cas12d, Cas12e, Cas12g, Cas12h, or Cas12i. In an embodiment, the adenosine deaminase variant is inserted between amino acid positions: a) 153-154, 255-256, 306-307, 980-981, 1019-1020, 534-535, 604-605, or 344-345 of BhCas12b or a corresponding amino acid residue of Cas12a, Cas12c, Cas12d, Cas12e, Cas12g, Cas12h, or Cas12i; b) 147 and 148, 248 and 249, 299 and 300, 991 and 992, or 1031 and 1032 of BvCas12b or a corresponding amino acid residue of Cas12a, Cas12c, Cas12d, Cas12e, Cas12g, Cas12h, or Cas12i; or c) 157 and 158, 258 and 259, 310 and 311, 1008 and 1009, or 1044 and 1045 of AaCas12b, ora corresponding amino acid residue of Cas12a, Cas12c, Cas12d, Cas12e, Cas12g, Cas12h, or Cas12i. In an embodiment, the adenosine deaminase variant is inserted within the Cas12 polypeptide at the loci identified in Table 14B. In an embodiment, the Cas12 polypeptide is Cas12b. In an embodiment, the Cas12 polypeptide comprises a BhCas12b domain, a BvCas12b domain, or an AACas12b domain.

[0028] In an embodiment of the above-delineated methods, the guide RNA comprises a CRISPR RNA (crRNA) and a trans-activating crRNA (tracrRNA). In an embodiment of the above-delineated methods, the subject is a mammal or a human.

[0029] In another aspect, a pharmaceutical composition comprising a base editing system comprising the fusion protein of any one of the above-delineated methods, aspects and embodiments, and a pharmaceutically acceptable carrier, vehicle, or excipient is provided. In an embodiment, the pharmaceutical composition further comprises a guide RNA comprising a nucleic acid sequence selected from the group consisting of CUUCUCCACAGGAGUCAGAU (SEQ ID NO: 4); ACUUCUCCACAGGAGUCAGAU (SEQ ID NO: 5); and

GACUUCUCCACAGGAGUCAGAU (SEQ ID NO: 6). In an embodiment, the gRNA further comprises a nucleic acid sequence
GUUUUUGUACUCUCAAGAUUUAAGUAACUGUACAACGAAACUUACACAGUUACU UAAAUCUUGCAGAAGCUACAAAGAUAAGGCUUCAUGCCGAAAUCAACACCCUGU CAUUUUAUGGCAGGGUG (SEQ ID NO: 7). In an embodiment, the gRNA comprises a nucleic acid sequence selected from

### CUUCUCCACAGGAGUCAGAUGUUUUUGUACUCUCAAGAUUUAAGUAACUGUACA ACGAAACUUACACAGUUACUUAAAUCUUGCAGAAGCUACAAAGAUAAGGCUUCA UGCCGAAAUCAACACCCUGUCAUUUUAUGGCAGGGUG (SEQ ID NO: 8);

### ACUUCUCCACAGGAGUCAGAUGUUUUUGUACUCUCAAGAUUUAAGUAACUGUAC AACGAAACUUACACAGUUACUUAAAUCUUGCAGAAGCUACAAAGAUAAGGCUUC AUGCCGAAAUCAACACCCUGUCAUUUUAUGGCAGGGUG (SEQ ID NO: 9); and

### GACUUCUCCACAGGAGUCAGAUGUUUUUGUACUCUCAAGAUUUAAGUAACUGUA CAACGAAACUUACACAGUUACUUAAAUCUUGCAGAAGCUACAAAGAUAAGGCUU CAUGCCGAAAUCAACACCCUGUCAUUUUAUGGCAGGGUG (SEQ ID NO: 10)

[0030] In an aspect, a pharmaceutical composition comprising a base editor or a polynucleotide encoding the base editor is provided, wherein the base editor comprises a polynucleotide programmable DNA binding domain and an adenosine deaminase domain described in any one the above-delineated methods, aspects and embodiments; and one or more guide polynucleotides that target the base editor to effect an A•T to G•C alteration of the SNP associated with sickle cell disease, and a pharmaceutically acceptable carrier, vehicle or excipient.

[0031] In another aspect, a pharmaceutical composition comprising the cell of the above-delineated aspects and embodiments, and a pharmaceutically acceptable carrier, vehicle or excipient, is provided.

[0032] In another aspect, a kit comprising a base editing system comprising the fusion protein of any one of the above-delineated methods, aspects and embodiments is provided. In an embodiment, the kit further comprises a guide RNA comprising a nucleic acid sequence selected from the group consisting of CUUCUCCACAGGAGUCAGAU (SEQ ID NO: 4);

### ACUUCUCCACAGGAGUCAGAU (SEQ ID NO: 5); and

### GACUUCUCCACAGGAGUCAGAU (SEQ ID NO: 6).

[0033] In another aspect, a kit comprising a base editor or a polynucleotide encoding the base editor is provided, wherein the base editor comprises a polynucleotide programmable DNA binding domain and an adenosine deaminase domain described in any one of the above-delineated methods, aspects and embodiments; and one or more guide polynucleotides that target the base editor to effect an A•T to G•C alteration of the SNP associated with sickle cell disease.

[0034] In another aspect, a kit comprising the cell of any one of the above-delineated aspects and embodiments is provided. In an embodiment of the kits, the kit further comprises a package insert with instructions for use.

[0035] In an aspect, provided herein is a base editor system comprising a polynucleotide programmable DNA binding domain and at least one base editor domain that comprises an adenosine deaminase variant comprising an alteration at amino acid position 82 or 166 of MSEVEFSHEYWMRHALTLAKRARDEREVPVGAVLVLNNRVIGEGWNRAIGLHDPTAH AEIMALRQGGLVMQNYRLIDATLYVTFEPCVMCAGAMIHSRIGRVVFGVRNAKTGAA GSLMDVLHYPGMNHRVEITEGILADECAALLCYFFRMPRQVFNAQKKAQSSTD (SEQ ID NO: 2) and a guide RNA, wherein said guide RNA targets said base editor to effect an alteration of the SNP associated with alpha-1 antitrypsin deficiency. In some embodiments, the adenosine deaminase variant comprises a V82S alteration and/or a T166R alteration. In some embodiments, the adenosine deaminase variant further comprises one or more of the following alterations: Y147T, Y147R, Q154S, Y123H, and Q154R. In some embodiments, the base editor domain comprises an adenosine deaminase heterodimer comprising a wild-type adenosine deaminase domain and an adenosine deaminase variant. In some embodiments, the adenosine deaminase variant is a truncated TadA8 that is missing 1, 2, 3, 4, 5, 6, 7, 8, 9, 10, 11, 12, 13, 14, 15, 6, 17, 18, 19, or 20 N-terminal amino acid residues relative to the full length TadA8. In some embodiments, the adenosine deaminase variant is a truncated TadA8 that is missing 1, 2, 3, 4, 5, 6, 7, 8, 9, 10, 11, 12, 13, 14, 15, 6, 17, 18, 19, or 20 C-terminal amino acid residues relative to the full length TadA8. In some embodiments, the polynucleotide programmable DNA binding domain is a modified Staphylococcus aureus Cas9 (SaCas9), Streptococcus thermophilus 1 Cas9 (St1Cas9), a modified Streptococcus pyogenes Cas9 (SpCas9), or variants thereof. In some embodiments, the polynucleotide programmable DNA binding domain is a variant of SpCas9 having an altered protospacer-adjacent motif (PAM) specificity or specificity for a non-G PAM. In some embodiments, the polynucleotide programmable DNA binding domain is a nuclease inactive Cas9. In some embodiments, the polynucleotide programmable DNA binding domain is a Cas9 nickase.

[0036] In an aspect, provided herein is a base editor system comprising one or more guide RNAs and a fusion protein comprising a polynucleotide programmable DNA binding domain comprising the following sequence:

EIGKATAKYFFYSNIMNFFKTEITLANGEIRKRPLIETNGETGEIVWDKGRDFATVRKVL SMPQVNIVKKTEVQTGGFSKESILPKRNSDKLIARKKDWDPKKYGGFMQPTVAYSVLV VAKVEKGKSKKLKSVKELLGITIMERSSFEKNPIDFLEAKGYKEVKKDLIIKLPKYSLFEL ENGRKRMLASAKFLQKGNELALPSKYVNFLYLASHYEKLKGSPEDNEQKQLFVEQHK HYLDEIIEQISEFSKRVILADANLDKVLSAYNKHRDKPIREQAENIIHLFTLTNLGAPRAF KYFDTTIARKEYRSTKEVLDATLIHQSITGLYETRIDLSQLGGDGGSGGSGGSGGSGGSG GSGGMDKKYSIGLAIGTNSVGWAVITDEYKVPSKKFKVLGNTDRHSIKKNLIGALLFDS GETAEATRLKRTARRRYTRRKNRICYLQEIFSNEMAKVDDSFFHRLEESFLVEEDKKHE RHPIFGNIVDEVAYHEKYPTIYHLRKKLVDSTDKADLRLIYLALAHMIKFRGHFLIEGDL NPDNSDVDKLFIQLVQTYNQLFEENPINASGVDAKAILSARLSKSRRLENLIAQLPGEKK NGLFGNLIALSLGLTPNFKSNFDLAEDAKLQLSKDTYDDDLDNLLAQIGDQYADLFLAA KNLSDAILLSDILRVNTEITKAPLSASMIKRYDEHHQDLTLLKALVRQQLPEKYKEIFFD QSKNGYAGYIDGGASQEEFYKFIKPILEKMDGTEELLVKLNREDLLRKQRTFDNGSIPH QIHLGELHAILRRQEDFYPFLKDNREKIEKILTFRIPYYVGPLARGNSRFAWMTRKSEETI TPWNFEEVVDKGASAQSFIERMTNFDKNLPNEKVLPKHSLLYEYFTVYNELTKVKYVT EGMRKPAFLSGEQKKAIVDLLFKTNRKVTVKQLKEDYFKKIECFDSVEISGVEDRFNAS LGTYHDLLKIIKDKDFLDNEENEDILEDIVLTLTLFEDREMIEERLKTYAHLFDDKVMKQ LKRRRYTGWGRLSRKLINGIRDKQSGKTILDFLKSDGFANRNFMQLIHDDSLTFKEDIQ KAQVSGQGDSLHEHIANLAGSPAIKKGILQTVKVVDELVKVMGRHKPENIVIEMAREN QTTQKGQKNSRERMKRIEEGIKELGSQILKEHPVENTQLQNEKLYLYYLQNGRDMYVD QELDINRLSDYDVDHIVPQSFLKDDSIDNKVLTRSDKNRGKSDNVPSEEVVKKMKNYW RQLLNAKLITQRKFDNLTKAERGGLSELDKAGFIKRQLVETRQITKHVAQILDSRMNTK YDENDKLIREVKVITLKSKLVSDFRKDFQFYKVREINNYHHAHDAYLNAVVGTALIKK YPKLESEFVYGDYKVYDVRKMIAKSEQEGADKRTADGSEFESPKKKRKV* (SEQ ID NO: 3), wherein the bold sequence indicates sequence derived from Cas9, the italics sequence denotes a linker sequence, and the underlined sequence denotes a bipartite nuclear localization sequence, and at least one base editor domain comprising an adenosine deaminase variant comprising an alteration at amino acid position 82 and/or 166 of MSEVEFSHEYWMRHALTLAKRARDEREVPVGAVLVLNNRVIGEGWNRAIGLHDPTAH AEIMALRQGGLVMQNYRLIDATLYVTFEPCVMCAGAMIHSRIGRVVFGVRNAKTGAA GSLMDVLHYPGMNHRVEITEGILADECAALLCYFFRMPRQVFNAQKKAQSSTD (SEQ ID NO: 2), and wherein the one or more guide RNAs target said base editor to effect an alteration of the SNP associated with alpha-1 antitrypsin deficiency.

[0037] In one aspect, a cell comprising any one of the above delineated the base editor systems is provided. In some embodiments, the cell is a human cell or a mammalian cell. In some embodiments, the cell is ex vivo, in vivo, or in vitro.

[0038] The description and examples herein illustrate embodiments of the present disclosure in detail. It is to be understood that this disclosure is not limited to the particular embodiments described herein and as such can vary. Those of skill in the art will recognize that there are numerous variations and modifications of this disclosure, which are encompassed within its scope.

[0039] The invention provides compositions and methods for editing mutations associated with sickle cell disease (SCD). Compositions and articles defined by the invention were isolated or otherwise manufactured in connection with the examples provided below. Other features and advantages of the invention will be apparent from the detailed description, and from the claims. The practice of some embodiments disclosed herein employ, unless otherwise indicated, conventional techniques of immunology, biochemistry, chemistry, molecular biology, microbiology, cell biology, genomics and recombinant DNA, which are within the skill of the art. See for example Sambrook and Green, Molecular Cloning: A Laboratory Manual, 4th Edition (2012); the series Current Protocols in Molecular Biology (F. M. Ausubel, et al. eds.); the series Methods In Enzymology (Academic Press, Inc.), PCR 2: A Practical Approach (M. J. MacPherson, B. D. Hames and G. R. Taylor eds. (1995)), Harlow and Lane, eds. (1988) Antibodies, A Laboratory Manual, and Culture of Animal Cells: A Manual of Basic Technique and Specialized Applications, 6th Edition (R. I. Freshney, ed. (2010)).

[0040] The section headings used herein are for organizational purposes only and are not to be construed as limiting the subject matter described.

[0041] Although various features of the present disclosure can be described in the context of a single embodiment, the features can also be provided separately or in any suitable combination. Conversely, although the present disclosure can be described herein in the context of separate embodiments for clarity, the present disclosure can also be implemented in a single embodiment. The section headings used herein are for organizational purposes only and are not to be construed as limiting the subject matter described.

[0042] The features of the present disclosure are set forth with particularity in the appended claims. A better understanding of the features and advantages of the present will be obtained by reference to the following detailed description that sets forth illustrative embodiments, in which the principles of the disclosure are utilized, and in view of the accompanying drawings as described hereinbelow.

### Definitions

[0043] The following definitions supplement those in the art and are directed to the current application and are not to be imputed to any related or unrelated case, e.g., to any commonly owned patent or application. Although any methods and materials similar or equivalent to those described herein can be used in the practice for testing of the present disclosure, the preferred materials and methods are described herein. Accordingly, the terminology used herein is for the purpose of describing particular embodiments only and is not intended to be limiting.

[0044] Unless defined otherwise, all technical and scientific terms used herein have the meaning commonly understood by a person skilled in the art to which this invention belongs. The following references provide one of skill with a general definition of many of the terms used in this invention: Singleton et al., Dictionary of Microbiology and Molecular Biology (2nd ed. 1994); The Cambridge Dictionary of Science and Technology (Walker ed., 1988); The Glossary of Genetics, 5th Ed., R. Rieger et al. (eds.), Springer Verlag (1991); and Hale & Marham, The Harper Collins Dictionary of Biology (1991).

[0045] In this application, the use of the singular includes the plural unless specifically stated otherwise. It must be noted that, as used in the specification, the singular forms “a,” “an,” and “the” include plural references unless the context clearly dictates otherwise. In this application, the use of “or” means “and/or,” unless stated otherwise, and is understood to be inclusive. Furthermore, use of the term “including” as well as other forms, such as “include,” “includes,” and “included,” is not limiting.

[0046] As used in this specification and claim(s), the words “comprising” (and any form of comprising, such as “comprise” and “comprises”), “having” (and any form of having, such as “have” and “has”), “including” (and any form of including, such as “includes” and “include”) or “containing” (and any form of containing, such as “contains” and “contain”) are inclusive or open-ended and do not exclude additional, unrecited elements or method steps. It is contemplated that any embodiment discussed in this specification can be implemented with respect to any method or composition of the present disclosure, and vice versa. Furthermore, compositions of the present disclosure can be used to achieve methods of the present disclosure.

[0047] The term “about” or “approximately” means within an acceptable error range for the particular value as determined by one of ordinary skill in the art, which will depend in part on how the value is measured or determined, i.e., the limitations of the measurement system. For example, “about” can mean within 1 or more than 1 standard deviation, per the practice in the art. Alternatively, “about” can mean a range of up to 20%, up to 10%, up to 5%, or up to 1% of a given value. Alternatively, particularly with respect to biological systems or processes, the term can mean within an order of magnitude, such as within 5-fold or within 2-fold, of a value. Where particular values are described in the application and claims, unless otherwise stated the term “about” meaning within an acceptable error range for the particular value should be assumed.

[0048] Ranges provided herein are understood to be shorthand for all of the values within the range. For example, a range of 1 to 50 is understood to include any number, combination of numbers, or sub-range from the group consisting 1, 2, 3, 4, 5, 6, 7, 8, 9, 10, 11, 12, 13, 14, 15, 16, 17, 18, 19, 20, 21, 22, 23, 24, 25, 26, 27, 28, 29, 30, 31, 32, 33, 34, 35, 36, 37, 38, 39, 40, 41, 42, 43, 44, 45, 46, 47, 48, 49, or 50.

[0049] Reference in the specification to “some embodiments,” “an embodiment,” “one embodiment” or “other embodiments” means that a particular feature, structure, or characteristic described in connection with the embodiments is included in at least some embodiments, but not necessarily all embodiments, of the present disclosures.

[0050] By “adenosine deaminase” is meant a polypeptide or fragment thereof capable of catalyzing the hydrolytic deamination of adenine or adenosine. In some embodiments, the deaminase or deaminase domain is an adenosine deaminase catalyzing the hydrolytic deamination of adenosine to inosine or deoxy adenosine to deoxyinosine. In some embodiments, the adenosine deaminase catalyzes the hydrolytic deamination of adenine or adenosine in deoxyribonucleic acid (DNA). The adenosine deaminases (e.g., engineered adenosine deaminases, evolved adenosine deaminases) provided herein may be from any organism, such as a bacterium. In some embodiments, the adenosine deaminase comprises an alteration in the following sequence:

(SEQ ID NO: 2)
MSEVEFSHEYWMRHALTLAKRARDEREVPVGAVLVLNNRVIGEGWNRAIG
LHDPTAHAEIMALRQGGLVMQNYRLIDATLYVTFEPCVMCAGAMIHSRIG
RVVFGVRNAKTGAAGSLMDVLHYPGMNHRVEITEGILADECAALLCYFFR
MPRQVFNAQKKAQSSTD

(also termed TadA*7.10).

[0051] In some embodiments, TadA*7.10 comprises at least one alteration. In some embodiments, TadA*7.10 comprises an alteration at amino acid 82 and/or 166. In particular embodiments, a variant of the above-referenced sequence comprises one or more of the following alterations: Y147T, Y147R, Q154S, Y123H, V82S, T166R, and/or Q154R. In other embodiments, a variant of the TadA7.10 sequence comprises a combination of alterations selected from the following: Y147T+Q154R; Y147T+Q154S; Y147R+Q154S; V82S+Q154S; V82S+Y147R; V82S+Q154R; V82S+Y123H; I76Y+V82S; V82S+Y123H+Y147T; V82S+Y123H+Y147R; V82S+Y123H+Q154R; Y147R+Q154R+Y123H; Y147R+Q154R+I76Y; Y147R+Q154R+T166R; Y123H+Y147R+Q154R+I76Y; V82S+Y123H+Y147R+Q154R; and I76Y+V82S+Y123H+Y147R+Q154R.

[0052] In other embodiments, the invention provides adenosine deaminase variants that include deletions, e.g., TadA*8, comprising a deletion of the C terminus beginning at residue 149, 150, 151, 152, 153, 154, 155, 156, or 157. In other embodiments, the adenosine deaminase variant is a TadA (e.g., TadA*8) monomer comprising one or more of the following alterations: Y147T, Y147R, Q154S, Y123H, V82S, T166R, and/or Q154R. In other embodiments, the adenosine deaminase variant is a monomer comprising a combination of alterations selected from the following: Y147T+Q154R; Y147T+Q154S; Y147R+Q154S; V82S+Q154S; V82S+Y147R; V82S+Q154R; V82S+Y123H; I76Y+V82S; V82S+Y123H+Y147T; V82S+Y123H+Y147R; V82S+Y123H+Q154R; Y147R+Q154R+Y123H; Y147R+Q154R+I76Y; Y147R+Q154R+T166R; Y123H+Y147R+Q154R+I76Y; V82S+Y123H+Y147R+Q154R; and I76Y+V82S+Y123H+Y147R+Q154R.

[0053] In still other embodiments, the adenosine deaminase variant is a homodimer comprising two adenosine deaminase domains (e.g., TadA*8) each having one or more of the following alterations Y147T, Y147R, Q154S, Y123H, V82S, T166R, and/or Q154R. In other embodiments, the adenosine deaminase variant is a homodimer comprising two adenosine deaminase domains (e.g., TadA*8) each having a combination of alterations selected from the group of: Y147T+Q154R; Y147T+Q154S; Y147R+Q154S; V82S+Q154S; V82S+Y147R; V82S+Q154R; V82S+Y123H; I76Y+V82S; V82S+Y123H+Y147T; V82S+Y123H+Y147R; V82S+Y123H+Q154R; Y147R+Q154R+Y123H; Y147R+Q154R+I76Y; Y147R+Q154R+T166R; Y123H+Y147R+Q154R+I76Y; V82S+Y123H+Y147R+Q154R; and I76Y+V82S+Y123H+Y147R+Q154R.

[0054] In other embodiments, the adenosine deaminase variant is a heterodimer comprising a wild-type TadA adenosine deaminase domain and an adenosine deaminase variant domain (e.g., TadA*8) comprising one or more of the following alterations Y147T, Y147R, Q154S, Y123H, V82S, T166R, and/or Q154R. In other embodiments, the adenosine deaminase variant is a heterodimer comprising a wild-type TadA adenosine deaminase domain and an adenosine deaminase variant domain (e.g., TadA*8) comprising a combination of alterations selected from the following: Y147T+Q154R; Y147T+Q154S; Y147R+Q154S; V82S+Q154S; V82S+Y147R; V82S+Q154R; V82S+Y123H; I76Y+V82S; V82S+Y123H+Y147T; V82S+Y123H+Y147R; V82S+Y123H+Q154R; Y147R+Q154R+Y123H; Y147R+Q154R+I76Y; Y147R+Q154R+T166R; Y123H+Y147R+Q154R+I76Y; V82S+Y123H+Y147R+Q154R; and I76Y+V82S+Y123H+Y147R+Q154R.

[0055] In other embodiments, the adenosine deaminase variant is a heterodimer comprising a TadA*7.10 domain and an adenosine deaminase variant domain (e.g., TadA*8) comprising one or more of the following alterations Y147T, Y147R, Q154S, Y123H, V82S, T166R, and/or Q154R. In other embodiments, the adenosine deaminase variant is a heterodimer comprising a TadA*7.10 domain and an adenosine deaminase variant domain (e.g. TadA*8) comprising a combination of the following alterations: Y147T+Q154R; Y147T+Q154S; Y147R+Q154S; V82S+Q154S; V82S+Y147R; V82S+Q154R; V82S+Y123H; I76Y+V82S; V82S+Y123H+Y147T; V82S+Y123H+Y147R; V82S+Y123H+Q154R; Y147R+Q154R+Y123H; Y147R+Q154R+I76Y; Y147R+Q154R+T166R; Y123H+Y147R+Q154R+I76Y; V82S+Y123H+Y147R+Q154R; or I76Y+V82S+Y123H+Y147R+Q154R.

[0056] In one embodiment, the adenosine deaminase is a TadA*8 that comprises or consists essentially of the following sequence or a fragment thereof having adenosine deaminase activity:

(SEQ ID NO: 17)
MSEVEFSHEYWMRHALTLAKRARDEREVPVGAVLVLNNRVIGEGWNRAIG
LHDPTAHAEIMALRQGGLVMQNYRLIDATLYVTFEPCVMCAGAMIHSRIG
RVVFGVRNAKTGAAGSLMDVLHYPGMNHRVEITEGILADECAALLCTFFR
MPRQVFNAQKKAQSSTD.

[0057] In some embodiments, the TadA*8 is truncated. In some embodiments, the truncated TadA*8 is missing 1, 2, 3, 4, 5, 6, 7, 8, 9, 10, 11, 12, 13, 14, 15, 6, 17, 18, 19, or 20 N-terminal amino acid residues relative to the full length TadA*8. In some embodiments, the truncated TadA*8 is missing 1, 2, 3, 4, 5, 6, 7, 8, 9, 10, 11, 12, 13, 14, 15, 6, 17, 18, 19, or 20 C-terminal amino acid residues relative to the full length TadA*8. In some embodiments the adenosine deaminase variant is a full-length TadA*8.

[0058] In particular embodiments, an adenosine deaminase heterodimer comprises a TadA*8 domain and an adenosine deaminase domain selected from one of the following:

Staphylococcus aureus (S. aureus) TadA:

(SEQ ID NO: 18)
MGSHMTNDIYFMTLAIEEAKKAAQLGEVPIGAIITKDDEVIARAHNLRET
LQQPTAHAEHIAIERAAKVLGSWRLEGCTLYVTLEPCVMCAGTIVMSRIP
RVVYGADDPKGGCSGSLMNLLQQSNFNHRAIVDKGVLKEACSTLLTTFFK
NLRANKKSTN

Bacillus subtilis (B. subtilis) TadA:

(SEQ ID NO: 19)
MTQDELYMKEAIKEAKKAEEKGEVPIGAVLVINGEIIARAHNLRETEQR
SIAHAEMLVIDEACKALGTWRLEGATLYVTLEPCPMCAGAVVLSRVEKV
VFGAFDPKGGCSGTLMNLLQEERFNHQAEVVSGVLEEECGGMLSAFFRE
LRKKKKAARKNLSE

Salmonella typhimurium (S. typhimurium) TadA:

(SEQ ID NO: 20)
MPPAFITGVTSLSDVELDHEYWMRHALTLAKRAWDEREVPVGAVLVHNH
RVIGEGWNRPIGRHDPTAHAEIMALRQGGLVLQNYRLLDTTLYVTLEPC
VMCAGAMVHSRIGRVVFGARDAKTGAAGSLIDVLHHPGMNHRVEIIEGV
LRDECATLLSDFFRMRRQEIKALKKADRAEGAGPAV

Shewanella putrefaciens (S. putrefaciens) TadA:

(SEQ ID NO: 21)
MDEYWMQVAMQMAEKAEAAGEVPVGAVLVKDGQQIATGYNLSISQHDPT
AHAEILCLRSAGKKLENYRLLDATLYITLEPCAMCAGAMVHSRIARVVY
GARDEKTGAAGTVVNLLQHPAFNHQVEVTSGVLAEACSAQLSRFFKRRR
DEKKALKLAQRAQQGIE

Haemophilus influenzae F3031 (H. influenzae) TadA:

(SEQ ID NO: 22)
MDAAKVRSEFDEKMMRYALELADKAEALGEIPVGAVLVDDARNIIGEGW
NLSIVQSDPTAHAEIIALRNGAKNIQNYRLLNSTLYVTLEPCTMCAGAI
LHSRIKRLVFGASDYKTGAIGSRFHFFDDYKMNHTLEITSGVLAEECSQ
KLSTFFQKRREEKKIEKALLKSLSDK

Caulobacter crescentus (C. crescentus) TadA:

(SEQ ID NO: 23)
MRTDESEDQDHRMMRLALDAARAAAEAGETPVGAVILDPSTGEVIATAG
NGPIAAHDPTAHAEIAAMRAAAAKLGNYRLTDLTLVVTLEPCAMCAGAI
SHARIGRVVFGADDPKGGAVVHGPKFFAQPTCHWRPEVTGGVLADESAD
LLRGFFRARRKAKI

Geobacter sulfurreducens (G. sulfurreducens) TadA:

(SEQ ID NO: 24)
MSSLKKTPIRDDAYWMGKAIREAAKAAARDEVPIGAVIVRDGAVIGRGH
NLREGSNDPSAHAEMIAIRQAARRSANWRLTGATLYVTLEPCLMCMGAI
ILARLERVVFGCYDPKGGAAGSLYDLSADPRLNHQVRLSPGVCQEECGT
MLSDFFRDLRRRKKAKATPALFIDERKVPPEP

### TadA*7.10

(SEQ ID NO: 2)
MSEVEFSHEYWMRHALTLAKRARDEREVPVGAVLVLNNRVIGEGWNRAI
GLHDPTAHAEIMALRQGGLVMQNYRLIDATLYVTFEPCVMCAGAMIHSR
IGRVVFGVRNAKTGAAGSLMDVLHYPGMNHRVEITEGILADECAALLCY
FFRMPRQVFNAQKKAQSSTD

[0060] By “Adenosine Deaminase Base Editor 8 (ABE8) polypeptide” is meant a base editor (BE) as defined and/or described herein comprising an adenosine deaminase variant comprising an alteration at amino acid position 82 and/or 166 of the following reference sequence:

MSEVEFSHEYWMRHALTLAKRARDEREVPVGAVLVLNNRVIGEGWNRAIGLHDPTAH AEIMALRQGGLVMQNYRLIDATLYVTFEPCVMCAGAMIHSRIGRVVFGVRNAKTGAA GSLMDVLHYPGMNHRVEITEGILADECAALLCYFFRMPRQVFNAQKKAQSSTD (SEQ ID NO: 2). In some embodiments, ABE8 comprises further alterations relative to the reference sequence.

[0061] By “Adenosine Deaminase Base Editor 8 (ABE8) polynucleotide” is meant a polynucleotide (polynucleotide sequence) encoding an ABE8 polypeptide.

[0062] “Administering” is referred to herein as providing one or more compositions described herein to a patient or a subject. By way of example and without limitation, composition administration, e.g., injection, can be performed by intravenous (i.v.) injection, sub-cutaneous (s.c.) injection, intradermal (i.d.) injection, intraperitoneal (i.p.) injection, or intramuscular (i.m.) injection. One or more such routes can be employed. Parenteral administration can be, for example, by bolus injection or by gradual perfusion over time. Alternatively, or concurrently, administration can be by the oral route.

[0063] By “agent” is meant any small molecule chemical compound, antibody, nucleic acid molecule, or polypeptide, or fragments thereof.

[0064] By “alteration” is meant a change (e.g. increase or decrease) in the structure, expression levels or activity of a gene or polypeptide as detected by standard art known methods such as those described herein. As used herein, an alteration includes a change in a polynucleotide or polypeptide sequence or a change in expression levels, such as a 25% change, a 40% change, a 50% change, or greater.

[0065] By “ameliorate” is meant decrease, suppress, attenuate, diminish, arrest, or stabilize the development or progression of a disease.

[0066] By “analog” is meant a molecule that is not identical but has analogous functional or structural features. For example, a polynucleotide or polypeptide analog retains the biological activity of a corresponding naturally-occurring polynucleotide or polypeptide while having certain modifications that enhance the analog's function relative to a naturally occurring polynucleotide or polypeptide. Such modifications could increase the analog's affinity for DNA, efficiency, specificity, protease or nuclease resistance, membrane permeability, and/or half-life, without altering, for example, ligand binding. An analog may include an unnatural nucleotide or amino acid.

[0067] By “base editor (BE)” or “nucleobase editor (NBE)” is meant an agent that binds a polynucleotide and has nucleobase modifying activity. In various embodiment, the base editor comprises a nucleobase modifying polypeptide (e.g., a deaminase) and a nucleic acid programmable nucleotide binding domain in conjunction with a guide polynucleotide (e.g., guide RNA). In various embodiments, the agent is a biomolecular complex comprising a protein domain having base editing activity, i.e., a domain capable of modifying a base (e.g., A, T, C, G, or U) within a nucleic acid molecule (e.g., DNA). In some embodiments, the polynucleotide programmable DNA binding domain is fused or linked to a deaminase domain. In one embodiment, the agent is a fusion protein comprising a domain having base editing activity. In another embodiment, the protein domain having base editing activity is linked to the guide RNA (e.g., via an RNA binding motif on the guide RNA and an RNA binding domain fused to the deaminase). In some embodiments, the domain having base editing activity is capable of deaminating a base within a nucleic acid molecule. In some embodiments, the base editor is capable of deaminating one or more bases within a DNA molecule. In some embodiments, the base editor is capable of deaminating an adenosine (A) within DNA. In some embodiments, the base editor is an adenosine base editor (ABE).

[0068] In some embodiments, base editors are generated (e.g. ABE8) by cloning an adenosine deaminase variant (e.g., TadA*8) into a scaffold that includes a circular permutant Cas9 (e.g., spCAS9 or saCAS9) and a bipartite nuclear localization sequence. Circular permutant Cas9s are known in the art and described, for example, in Oakes et al., Cell 176, 254-267, 2019. Exemplary circular permutants follow where the bold sequence indicates sequence derived from Cas9, the italics sequence denotes a linker sequence, and the underlined sequence denotes a bipartite nuclear localization sequence.

CP5 (with MSP “NGC=Pam Variant with mutations Regular Cas9 likes NGG” PID=Protein Interacting Domain and “D 10A” nickase):

(SEQ ID NO: 3)
EIGKATAKYFFYSNIMNFFKTEITLANGEIRKRPLIETNGETGEIVWD
KGRDFATVRKVLSMPQVNIVKKTEVQTGGFSKESILPKRNSDKLIARK
KDWDPKKYGGFMQPTVAYSVLVVAKVEKGKSKKLKSVKELLGITIMER
SSFEKNPIDFLEAKGYKEVKKDLIIKLPKYSLFELENGRKRMLASAKF
LQKGNELALPSKYVNFLYLASHYEKLKGSPEDNEQKQLFVEQHKHYLD
EIIEQISEFSKRVILADANLDKVLSAYNKHRDKPIREQAENIIHLFTL
TNLGAPRAFKYFDTTIARKEYRSTKEVLDATLIHQSITGLYETRIDLS
QLGGDGGSGGSGGSGGSGGSGGSGGMDKKYSIGLAIGTNSVGWAVITD
EYKVPSKKFEWLGNTDRHSIKKNLIGALLFDSGETAEATRLKRTARRR
YTRRKNRICYLQEIFSNEMAKVDDSFFHRLEESFLVEEDKKHERHPIF
GNIVDEVAYHEKYPTIYHLRKKLVDSTDKADLRLIYLALAHMIKFRGH
FLIEGDLNPDNSDVDKLFIQLVQTYNQLFEENPINASGVDAKAILSAR
LSKSRRLENLIAQLPGEKKNGLFGNLIALSLGLTPNFKSNFDLAEDAK
LQLSKDTYDDDLDNLLAQIGDQYADLFLAAKNLSDAILLSDILRVNTE
ITKAPLSASMIKRYDEHHQDLTLLKALVRQQLPEKYKEIFFDQSIMGY
AGYIDGGASQEEFYKFIKPILEKMDGTEELLVKLNREDLLRKQRTFDN
GSIPHQIHLGELHAILRRQEDFYPFLKDNREKIEKILTFRIPYYVGPL
ARGNSRFAWMTRKSEETITPWNFEEVVDKGASAQSFIERMTNFDKNLP
NEKVLPKHSLLYEYFTVYNELTKVKYVTEGMRKPAFLSGEQKKAIVDL
LFKTNRKVTVKQLKEDYFKKIECFDSVEISGVEDRFNASLGTYHDLLK
IIKDKDFLDNEENEDILEDIVLTLTLFEDREMIEERLKTYAHLFDDKV
MKQLKRRRYTGWGRLSRKLINGIRDKQSGKTILDFLKSDGFANRNFMQ
LIHDDSLTFKEDIQKAQVSGQGDSLHEHIANLAGSPAIKKGILQTVKV
VDELVKVMGRHKPENIVIEMARENQTTQKGQKNSRERMKRIEEGIKEL
GSQILKEHPVENTQLQNEKLYLYYLQNGRDMYVDQELDINRLSDYDVD
HIVPQSFLKDDSIDNKVLTRSDKNRGKSDNVPSEEVVKKMKNYWRQLL
NAKLITQRKFDNLTKAERGGLSELDKAGFIKRQLVETRQITKHVAQIL
DSRMNTKYDENDKLIREVKVITLKSKLVSDFRKDFQFYKVREINNYHH
AHDAYLNAVVGTALIKKYPKLESEFVYGDYKVYDVRKMIAKSEQEGAD
KRTADGSEFESPKKKRKV*

[0069] In some embodiments, the ABE8 is selected from a base editor from Table 6-9, 13, or 14 infra. In some embodiments, ABE8 contains an adenosine deaminase variant evolved from TadA. In some embodiments, the adenosine deaminase variant of ABE8 is a TadA*8 variant as described in Table 7, 9, 13 or 14 infra. In some embodiments, the adenosine deaminase variant is TadA*7.10 variant (e.g. TadA*8) comprising one or more of an alteration selected from the group of Y147T, Y147R, Q154S, Y123H, V82S, T166R, and/or Q154R. In various embodiments, ABE8 comprises TadA*7.10 variant (e.g. TadA*8) with a combination of alterations selected from the group of Y147T+Q154R; Y147T+Q154S; Y147R+Q154S; V82S+Q154S; V82S+Y147R; V82S+Q154R; V82S+Y123H; I76Y+V82S; V82S+Y123H+Y147T; V82S+Y123H+Y147R; V82S+Y123H+Q154R; Y147R+Q154R+Y123H; Y147R+Q154R+I76Y; Y147R+Q154R+T166R; Y123H+Y147R+Q154R+I76Y; V82S+Y123H+Y147R+Q154R; and I76Y+V82S+Y123H+Y147R+Q154R. In some embodiments ABE8 is a monomeric construct. In some embodiments, ABE8 is a heterodimeric construct. In some embodiments, the ABE8 comprises the sequence:

(SEQ ID NO: 17)
MSEVEFSHEYWMRHALTLAKRARDEREVPVGAVLVLNNRVIGEGWNRAI
GLHDPTAHAEIMALRQGGLVMQNYRLIDATLYVTFEPCVMCAGAMIHSR
IGRVVFGVRNAKTGAAGSLMDVLHYPGMNHRVEITEGILADECAALLCT
FFRMPRQVFNAQKKAQSSTD.

[0070] In some embodiments, the polynucleotide programmable DNA binding domain is a CRISPR associated (e.g., Cas or Cpf1) enzyme. In some embodiments, the base editor is a catalytically dead Cas9 (dCas9) fused to a deaminase domain. In some embodiments, the base editor is a Cas9 nickase (nCas9) fused to a deaminase domain. Details of base editors are described in International PCT Application Nos. PCT/2017/045381 (WO 2018/027078) and PCT/US2016/058344 (WO 2017/070632), each of which is incorporated herein by reference for its entirety. Also see Komor, A. C., et al., “Programmable editing of a target base in genomic DNA without double-stranded DNA cleavage” Nature 533, 420-424 (2016); Gaudelli, N. M., et al., “Programmable base editing of A•T to G•C in genomic DNA without DNA cleavage” Nature 551, 464-471 (2017); Komor, A. C., et al., “Improved base excision repair inhibition and bacteriophage Mu Gam protein yields C:G-to-T:A base editors with higher efficiency and product purity” Science Advances 3:eaao4774 (2017), and Rees, H. A., et al., “Base editing: precision chemistry on the genome and transcriptome of living cells.” Nat Rev Genet. 2018 December; 19(12):770-788. doi: 10.1038/s41576-018-0059-1, the entire contents of which are hereby incorporated by reference.

[0071] By way of example, the adenine base editor (ABE) as used in the base editing compositions, systems and methods described herein has the nucleic acid sequence (8877 base pairs), (Addgene, Watertown, Mass.; Gaudelli N M, et al., Nature. 2017 Nov. 23; 551(7681):464-471. doi: 10.1038/nature24644; Koblan L W, et al., Nat Biotechnol. 2018 October; 36(9):843-846. doi: 10.1038/nbt.4172.) as provided below. Polynucleotide sequences having at least 95% or greater identity to the ABE nucleic acid sequence are also encompassed.

(SEQ ID NO: 25)
ATATGCCAAGTACGCCCCCTATTGACGTCAATGAC
GGTAAATGGCCCGCCTGGCATTATGCCCAGTACAT
GACCTTATGGGACTTTCCTACTTGGCAGTACATCT
ACGTATTAGTCATCGCTATTACCATGGTGATGCGG
TTTTGGCAGTACATCAATGGGCGTGGATAGCGGTT
TGACTCACGGGGATTTCCAAGTCTCCACCCCATTG
ACGTCAATGGGAGTTTGTTTTGGCACCAAAATCAA
CGGGACTTTCCAAAATGTCGTAACAACTCCGCCCC
ATTGACGCAAATGGGCGGTAGGCGTGTACGGTGGG
AGGTCTATATAAGCAGAGCTGGTTTAGTGAACCGT
CAGATCCGCTAGAGATCCGCGGCCGCTAATACGAC
TCACTATAGGGAGAGCCGCCACCATGAAACGGACA
GCCGACGGAAGCGAGTTCGAGTCACCAAAGAAGAA
GCGGAAAGTCTCTGAAGTCGAGTTTAGCCACGAGT
ATTGGATGAGGCACGCACTGACCCTGGCAAAGCGA
GCATGGGATGAAAGAGAAGTCCCCGTGGGCGCCGT
GCTGGTGCACAACAATAGAGTGATCGGAGAGGGAT
GGAACAGGCCAATCGGCCGCCACGACCCTACCGCA
CACGCAGAGATCATGGCACTGAGGCAGGGAGGCCT
GGTCATGCAGAATTACCGCCTGATCGATGCCACCC
TGTATGTGACACTGGAGCCATGCGTGATGTGCGCA
GGAGCAATGATCCACAGCAGGATCGGAAGAGTGGT
GTTCGGAGCACGGGACGCCAAGACCGGCGCAGCAG
GCTCCCTGATGGATGTGCTGCACCACCCCGGCATG
AACCACCGGGTGGAGATCACAGAGGGAATCCTGGC
AGACGAGTGCGCCGCCCTGCTGAGCGATTTCTTTA
GAATGCGGAGACAGGAGATCAAGGCCCAGAAGAAG
GCACAGAGCTCCACCGACTCTGGAGGATCTAGCGG
AGGATCCTCTGGAAGCGAGACACCAGGCACAAGCG
AGTCCGCCACACCAGAGAGCTCCGGCGGCTCCTCC
GGAGGATCCTCTGAGGTGGAGTTTTCCCACGAGTA
CTGGATGAGACATGCCCTGACCCTGGCCAAGAGGG
CACGCGATGAGAGGGAGGTGCCTGTGGGAGCCGTG
CTGGTGCTGAACAATAGAGTGATCGGCGAGGGCTG
GAACAGAGCCATCGGCCTGCACGACCCAACAGCCC
ATGCCGAAATTATGGCCCTGAGACAGGGCGGCCTG
GTCATGCAGAACTACAGACTGATTGACGCCACCCT
GTACGTGACATTCGAGCCTTGCGTGATGTGCGCCG
GCGCCATGATCCACTCTAGGATCGGCCGCGTGGTG
TTTGGCGTGAGGAACGCAAAAACCGGCGCCGCAGG
CTCCCTGATGGACGTGCTGCACTACCCCGGCATGA
ATCACCGCGTCGAAATTACCGAGGGAATCCTGGCA
GATGAATGTGCCGCCCTGCTGTGCTATTTCTTTCG
GATGCCTAGACAGGTGTTCAATGCTCAGAAGAAGG
CCCAGAGCTCCACCGACTCCGGAGGATCTAGCGGA
GGCTCCTCTGGCTCTGAGACACCTGGCACAAGCGA
GAGCGCAACACCTGAAAGCAGCGGGGGCAGCAGCG
GGGGGTCAGACAAGAAGTACAGCATCGGCCTGGCC
ATCGGCACCAACTCTGTGGGCTGGGCCGTGATCAC
CGACGAGTACAAGGTGCCCAGCAAGAAATTCAAGG
TGCTGGGCAACACCGACCGGCACAGCATCAAGAAG
AACCTGATCGGAGCCCTGCTGTTCGACAGCGGCGA
AACAGCCGAGGCCACCCGGCTGAAGAGAACCGCCA
GAAGAAGATACACCAGACGGAAGAACCGGATCTGC
TATCTGCAAGAGATCTTCAGCAACGAGATGGCCAA
GGTGGACGACAGCTTCTTCCACAGACTGGAAGAGT
CCTTCCTGGTGGAAGAGGATAAGAAGCACGAGCGG
CACCCCATCTTCGGCAACATCGTGGACGAGGTGGC
CTACCACGAGAAGTACCCCACCATCTACCACCTGA
GAAAGAAACTGGTGGACAGCACCGACAAGGCCGAC
CTGCGGCTGATCTATCTGGCCCTGGCCCACATGAT
CAAGTTCCGGGGCCACTTCCTGATCGAGGGCGACC
TGAACCCCGACAACAGCGACGTGGACAAGCTGTTC
ATCCAGCTGGTGCAGACCTACAACCAGCTGTTCGA
GGAAAACCCCATCAACGCCAGCGGCGTGGACGCCA
AGGCCATCCTGTCTGCCAGACTGAGCAAGAGCAGA
CGGCTGGAAAATCTGATCGCCCAGCTGCCCGGCGA
GAAGAAGAATGGCCTGTTCGGAAACCTGATTGCCC
TGAGCCTGGGCCTGACCCCCAACTTCAAGAGCAAC
TTCGACCTGGCCGAGGATGCCAAACTGCAGCTGAG
CAAGGACACCTACGACGACGACCTGGACAACCTGC
TGGCCCAGATCGGCGACCAGTACGCCGACCTGTTT
CTGGCCGCCAAGAACCTGTCCGACGCCATCCTGCT
GAGCGACATCCTGAGAGTGAACACCGAGATCACCA
AGGCCCCCCTGAGCGCCTCTATGATCAAGAGATAC
GACGAGCACCACCAGGACCTGACCCTGCTGAAAGC
TCTCGTGCGGCAGCAGCTGCCTGAGAAGTACAAAG
AGATTTTCTTCGACCAGAGCAAGAACGGCTACGCC
GGCTACATTGACGGCGGAGCCAGCCAGGAAGAGTT
CTACAAGTTCATCAAGCCCATCCTGGAAAAGATGG
ACGGCACCGAGGAACTGCTCGTGAAGCTGAACAGA
GAGGACCTGCTGCGGAAGCAGCGGACCTTCGACAA
CGGCAGCATCCCCCACCAGATCCACCTGGGAGAGC
TGCACGCCATTCTGCGGCGGCAGGAAGATTTTTAC
CCATTCCTGAAGGACAACCGGGAAAAGATCGAGAA
GATCCTGACCTTCCGCATCCCCTACTACGTGGGCC
CTCTGGCCAGGGGAAACAGCAGATTCGCCTGGATG
ACCAGAAAGAGCGAGGAAACCATCACCCCCTGGAA
CTTCGAGGAAGTGGTGGACAAGGGCGCTTCCGCCC
AGAGCTTCATCGAGCGGATGACCAACTTCGATAAG
AACCTGCCCAACGAGAAGGTGCTGCCCAAGCACAG
CCTGCTGTACGAGTACTTCACCGTGTATAACGAGC
TGACCAAAGTGAAATACGTGACCGAGGGAATGAGA
AAGCCCGCCTTCCTGAGCGGCGAGCAGAAAAAGGC
CATCGTGGACCTGCTGTTCAAGACCAACCGGAAAG
TGACCGTGAAGCAGCTGAAAGAGGACTACTTCAAG
AAAATCGAGTGCTTCGACTCCGTGGAAATCTCCGG
CGTGGAAGATCGGTTCAACGCCTCCCTGGGCACAT
ACCACGATCTGCTGAAAATTATCAAGGACAAGGAC
TTCCTGGACAATGAGGAAAACGAGGACATTCTGGA
AGATATCGTGCTGACCCTGACACTGTTTGAGGACA
GAGAGATGATCGAGGAACGGCTGAAAACCTATGCC
CACCTGTTCGACGACAAAGTGATGAAGCAGCTGAA
GCGGCGGAGATACACCGGCTGGGGCAGGCTGAGCC
GGAAGCTGATCAACGGCATCCGGGACAAGCAGTCC
GGCAAGACAATCCTGGATTTCCTGAAGTCCGACGG
CTTCGCCAACAGAAACTTCATGCAGCTGATCCACG
ACGACAGCCTGACCTTTAAAGAGGACATCCAGAAA
GCCCAGGTGTCCGGCCAGGGCGATAGCCTGCACGA
GCACATTGCCAATCTGGCCGGCAGCCCCGCCATTA
AGAAGGGCATCCTGCAGACAGTGAAGGTGGTGGAC
GAGCTCGTGAAAGTGATGGGCCGGCACAAGCCCGA
GAACATCGTGATCGAAATGGCCAGAGAGAACCAGA
CCACCCAGAAGGGACAGAAGAACAGCCGCGAGAGA
ATGAAGCGGATCGAAGAGGGCATCAAAGAGCTGGG
CAGCCAGATCCTGAAAGAACACCCCGTGGAAAACA
CCCAGCTGCAGAACGAGAAGCTGTACCTGTACTAC
CTGCAGAATGGGCGGGATATGTACGTGGACCAGGA
ACTGGACATCAACCGGCTGTCCGACTACGATGTGG
ACCATATCGTGCCTCAGAGCTTTCTGAAGGACGAC
TCCATCGACAACAAGGTGCTGACCAGAAGCGACAA
GAACCGGGGCAAGAGCGACAACGTGCCCTCCGAAG
AGGTCGTGAAGAAGATGAAGAACTACTGGCGGCAG
CTGCTGAACGCCAAGCTGATTACCCAGAGAAAGTT
CGACAATCTGACCAAGGCCGAGAGAGGCGGCCTGA
GCGAACTGGATAAGGCCGGCTTCATCAAGAGACAG
CTGGTGGAAACCCGGCAGATCACAAAGCACGTGGC
ACAGATCCTGGACTCCCGGATGAACACTAAGTACG
ACGAGAATGACAAGCTGATCCGGGAAGTGAAAGTG
ATCACCCTGAAGTCCAAGCTGGTGTCCGATTTCCG
GAAGGATTTCCAGTTTTACAAAGTGCGCGAGATCA
ACAACTACCACCACGCCCACGACGCCTACCTGAAC
GCCGTCGTGGGAACCGCCCTGATCAAAAAGTACCC
TAAGCTGGAAAGCGAGTTCGTGTACGGCGACTACA
AGGTGTACGACGTGCGGAAGATGATCGCCAAGAGC
GAGCAGGAAATCGGCAAGGCTACCGCCAAGTACTT
CTTCTACAGCAACATCATGAACTTTTTCAAGACCG
AGATTACCCTGGCCAACGGCGAGATCCGGAAGCGG
CCTCTGATCGAGACAAACGGCGAAACCGGGGAGAT
CGTGTGGGATAAGGGCCGGGATTTTGCCACCGTGC
GGAAAGTGCTGAGCATGCCCCAAGTGAATATCGTG
AAAAAGACCGAGGTGCAGACAGGCGGCTTCAGCAA
AGAGTCTATCCTGCCCAAGAGGAACAGCGATAAGC
TGATCGCCAGAAAGAAGGACTGGGACCCTAAGAAG
TACGGCGGCTTCGACAGCCCCACCGTGGCCTATTC
TGTGCTGGTGGTGGCCAAAGTGGAAAAGGGCAAGT
CCAAGAAACTGAAGAGTGTGAAAGAGCTGCTGGGG
ATCACCATCATGGAAAGAAGCAGCTTCGAGAAGAA
TCCCATCGACTTTCTGGAAGCCAAGGGCTACAAAG
AAGTGAAAAAGGACCTGATCATCAAGCTGCCTAAG
TACTCCCTGTTCGAGCTGGAAAACGGCCGGAAGAG
AATGCTGGCCTCTGCCGGCGAACTGCAGAAGGGAA
ACGAACTGGCCCTGCCCTCCAAATATGTGAACTTC
CTGTACCTGGCCAGCCACTATGAGAAGCTGAAGGG
CTCCCCCGAGGATAATGAGCAGAAACAGCTGTTTG
TGGAACAGCACAAGCACTACCTGGACGAGATCATC
GAGCAGATCAGCGAGTTCTCCAAGAGAGTGATCCT
GGCCGACGCTAATCTGGACAAAGTGCTGTCCGCCT
ACAACAAGCACCGGGATAAGCCCATCAGAGAGCAG
GCCGAGAATATCATCCACCTGTTTACCCTGACCAA
TCTGGGAGCCCCTGCCGCCTTCAAGTACTTTGACA
CCACCATCGACCGGAAGAGGTACACCAGCACCAAA
GAGGTGCTGGACGCCACCCTGATCCACCAGAGCAT
CACCGGCCTGTACGAGACACGGATCGACCTGTCTC
AGCTGGGAGGTGACTCTGGCGGCTCAAAAAGAACC
GCCGACGGCAGCGAATTCGAGCCCAAGAAGAAGAG
GAAAGTCTAACCGGTCATCATCACCATCACCATTG
AGTTTAAACCCGCTGATCAGCCTCGACTGTGCCTT
CTAGTTGCCAGCCATCTGTTGTTTGCCCCTCCCCC
GTGCCTTCCTTGACCCTGGAAGGTGCCACTCCCAC
TGTCCTTTCCTAATAAAATGAGGAAATTGCATCGC
ATTGTCTGAGTAGGTGTCATTCTATTCTGGGGGGT
GGGGTGGGGCAGGACAGCAAGGGGGAGGATTGGGA
AGACAATAGCAGGCATGCTGGGGATGCGGTGGGCT
CTATGGCTTCTGAGGCGGAAAGAACCAGCTGGGGC
TCGATACCGTCGACCTCTAGCTAGAGCTTGGCGTA
ATCATGGTCATAGCTGTTTCCTGTGTGAAATTGTT
ATCCGCTCACAATTCCACACAACATACGAGCCGGA
AGCATAAAGTGTAAAGCCTAGGGTGCCTAATGAGT
GAGCTAACTCACATTAATTGCGTTGCGCTCACTGC
CCGCTTTCCAGTCGGGAAACCTGTCGTGCCAGCTG
CATTAATGAATCGGCCAACGCGCGGGGAGAGGCGG
TTTGCGTATTGGGCGCTCTTCCGCTTCCTCGCTCA
CTGACTCGCTGCGCTCGGTCGTTCGGCTGCGGCGA
GCGGTATCAGCTCACTCAAAGGCGGTAATACGGTT
ATCCACAGAATCAGGGGATAACGCAGGAAAGAACA
TGTGAGCAAAAGGCCAGCAAAAGGCCAGGAACCGT
AAAAAGGCCGCGTTGCTGGCGTTTTTCCATAGGCT
CCGCCCCCCTGACGAGCATCACAAAAATCGACGCT
CAAGTCAGAGGTGGCGAAACCCGACAGGACTATAA
AGATACCAGGCGTTTCCCCCTGGAAGCTCCCTCGT
GCGCTCTCCTGTTCCGACCCTGCCGCTTACCGGAT
ACCTGTCCGCCTTTCTCCCTTCGGGAAGCGTGGCG
CTTTCTCATAGCTCACGCTGTAGGTATCTCAGTTC
GGTGTAGGTCGTTCGCTCCAAGCTGGGCTGTGTGC
ACGAACCCCCCGTTCAGCCCGACCGCTGCGCCTTA
TCCGGTAACTATCGTCTTGAGTCCAACCCGGTAAG
ACACGACTTATCGCCACTGGCAGCAGCCACTGGTA
ACAGGATTAGCAGAGCGAGGTATGTAGGCGGTGCT
ACAGAGTTCTTGAAGTGGTGGCCTAACTACGGCTA
CACTAGAAGAACAGTATTTGGTATCTGCGCTCTGC
TGAAGCCAGTTACCTTCGGAAAAAGAGTTGGTAGC
TCTTGATCCGGCAAACAAACCACCGCTGGTAGCGG
TGGTTTTTTTGTTTGCAAGCAGCAGATTACGCGCA
GAAAAAAAGGATCTCAAGAAGATCCTTTGATCTTT
TCTACGGGGTCTGACACTCAGTGGAACGAAAACTC
ACGTTAAGGGATTTTGGTCATGAGATTATCAAAAA
GGATCTTCACCTAGATCCTTTTAAATTAAAAATGA
AGTTTTAAATCAATCTAAAGTATATATGAGTAAAC
TTGGTCTGACAGTTACCAATGCTTAATCAGTGAGG
CACCTATCTCAGCGATCTGTCTATTTCGTTCATCC
ATAGTTGCCTGACTCCCCGTCGTGTAGATAACTAC
GATACGGGAGGGCTTACCATCTGGCCCCAGTGCTG
CAATGATACCGCGAGACCCACGCTCACCGGCTCCA
GATTTATCAGCAATAAACCAGCCAGCCGGAAGGGC
CGAGCGCAGAAGTGGTCCTGCAACTTTATCCGCCT
CCATCCAGTCTATTAATTGTTGCCGGGAAGCTAGA
GTAAGTAGTTCGCCAGTTAATAGTTTGCGCAACGT
TGTTGCCATTGCTACAGGCATCGTGGTGTCACGCT
CGTCGTTTGGTATGGCTTCATTCAGCTCCGGTTCC
CAACGATCAAGGCGAGTTACATGATCCCCCATGTT
GTGCAAAAAAGCGGTTAGCTCCTTCGGTCCTCCGA
TCGTTGTCAGAAGTAAGTTGGCCGCAGTGTTATCA
CTCATGGTTATGGCAGCACTGCATAATTCTCTTAC
TGTCATGCCATCCGTAAGATGCTTTTCTGTGACTG
GTGAGTACTCAACCAAGTCATTCTGAGAATAGTGT
ATGCGGCGACCGAGTTGCTCTTGCCCGGCGTCAAT
ACGGGATAATACCGCGCCACATAGCAGAACTTTAA
AAGTGCTCATCATTGGAAAACGTTCTTCGGGGCGA
AAACTCTCAAGGATCTTACCGCTGTTGAGATCCAG
TTCGATGTAACCCACTCGTGCACCCAACTGATCTT
CAGCATCTTTTACTTTCACCAGCGTTTCTGGGTGA
GCAAAAACAGGAAGGCAAAATGCCGCAAAAAAGGG
AATAAGGGCGACACGGAAATGTTGAATACTCATAC
TCTTCCTTTTTCAATATTATTGAAGCATTTATCAG
GGTTATTGTCTCATGAGCGGATACATATTTGAATG
TATTTAGAAAAATAAACAAATAGGGGTTCCGCGCA
CATTTCCCCGAAAAGTGCCACCTGACGTCGACGGA
TCGGGAGATCGATCTCCCGATCCCCTAGGGTCGAC
TCTCAGTACAATCTGCTCTGATGCCGCATAGTTAA
GCCAGTATCTGCTCCCTGCTTGTGTGTTGGAGGTC
GCTGAGTAGTGCGCGAGCAAAATTTAAGCTACAAC
AAGGCAAGGCTTGACCGACAATTGCATGAAGAATC
TGCTTAGGGTTAGGCGTTTTGCGCTGCTTCGCGAT
GTACGGGCCAGATATACGCGTTGACATTGATTATT
GACTAGTTATTAATAGTAATCAATTACGGGGTCAT
TAGTTCATAGCCCATATATGGAGTTCCGCGTTACA
TAACTTACGGTAAATGGCCCGCCTGGCTGACCGCC
CAACGACCCCCGCCCATTGACGTCAATAATGACGT
ATGTTCCCATAGTAACGCCAATAGGGACTTTCCAT
TGACGTCAATGGGTGGAGTATTTACGGTAAACTGC
CCACTTGGCAGTACATCAAGTGTATC

[0072] By “base editing activity” is meant acting to chemically alter a base within a polynucleotide. In one embodiment, a first base is converted to a second base. In one embodiment, the base editing activity is adenosine or adenine deaminase activity, e.g., converting A•T to G•C. In some embodiments, base editing activity is assessed by efficiency of editing. Base editing efficiency may be measured by any suitable means, for example, by sanger sequencing or next generation sequencing. In some embodiments, base editing efficiency is measured by percentage of total sequencing reads with nucleobase conversion effected by the base editor, for example, percentage of total sequencing reads with target A.T base pair converted to a G.C base pair. In some embodiments, base editing efficiency is measured by percentage of total cells with nucleobase conversion effected by the base editor, when base editing is performed in a population of cells.

[0073] The term “base editor system” refers to a system for editing a nucleobase of a target nucleotide sequence. In various embodiments, the base editor system comprises (1) a polynucleotide programmable nucleotide binding domain (e.g. Cas9); (2) a deaminase domain (e.g. an adenosine deaminase) for deaminating said nucleobase; and (3) one or more guide polynucleotide (e.g., guide RNA). In some embodiments, the polynucleotide programmable nucleotide binding domain is a polynucleotide programmable DNA binding domain. In some embodiments, the base editor is an adenine or adenosine base editor (ABE). In some embodiments, the base editor system is ABE8.

[0074] In some embodiments, a base editor system may comprise more than one base editing component. For example, a base editor system may include more than one deaminase. In some embodiments, a base editor system may include one or more adenosine deaminases. In some embodiments, a single guide polynucleotide may be utilized to target different deaminases to a target nucleic acid sequence. In some embodiments, a single pair of guide polynucleotides may be utilized to target different deaminases to a target nucleic acid sequence.

[0075] The deaminase domain and the polynucleotide programmable nucleotide binding component of a base editor system may be associated with each other covalently or non-covalently, or any combination of associations and interactions thereof. For example, in some embodiments, a deaminase domain can be targeted to a target nucleotide sequence by a polynucleotide programmable nucleotide binding domain. In some embodiments, a polynucleotide programmable nucleotide binding domain can be fused or linked to a deaminase domain. In some embodiments, a polynucleotide programmable nucleotide binding domain can target a deaminase domain to a target nucleotide sequence by non-covalently interacting with or associating with the deaminase domain. For example, in some embodiments, the deaminase domain can comprise an additional heterologous portion or domain that is capable of interacting with, associating with, or capable of forming a complex with an additional heterologous portion or domain that is part of a polynucleotide programmable nucleotide binding domain. In some embodiments, the additional heterologous portion may be capable of binding to, interacting with, associating with, or forming a complex with a polypeptide. In some embodiments, the additional heterologous portion may be capable of binding to, interacting with, associating with, or forming a complex with a polynucleotide. In some embodiments, the additional heterologous portion may be capable of binding to a guide polynucleotide. In some embodiments, the additional heterologous portion may be capable of binding to a polypeptide linker. In some embodiments, the additional heterologous portion may be capable of binding to a polynucleotide linker. The additional heterologous portion may be a protein domain. In some embodiments, the additional heterologous portion may be a K Homology (KH) domain, a MS2 coat protein domain, a PP7 coat protein domain, a SfMu Com coat protein domain, a steril alpha motif, a telomerase Ku binding motif and Ku protein, a telomerase Sm7 binding motif and Sm7 protein, or a RNA recognition motif.

[0076] A base editor system may further comprise a guide polynucleotide component. It should be appreciated that components of the base editor system may be associated with each other via covalent bonds, noncovalent interactions, or any combination of associations and interactions thereof. In some embodiments, a deaminase domain can be targeted to a target nucleotide sequence by a guide polynucleotide. For example, in some embodiments, the deaminase domain can comprise an additional heterologous portion or domain (e.g., polynucleotide binding domain such as an RNA or DNA binding protein) that is capable of interacting with, associating with, or capable of forming a complex with a portion or segment (e.g., a polynucleotide motif) of a guide polynucleotide. In some embodiments, the additional heterologous portion or domain (e.g., polynucleotide binding domain such as an RNA or DNA binding protein) can be fused or linked to the deaminase domain. In some embodiments, the additional heterologous portion may be capable of binding to, interacting with, associating with, or forming a complex with a polypeptide. In some embodiments, the additional heterologous portion may be capable of binding to, interacting with, associating with, or forming a complex with a polynucleotide. In some embodiments, the additional heterologous portion may be capable of binding to a guide polynucleotide. In some embodiments, the additional heterologous portion may be capable of binding to a polypeptide linker. In some embodiments, the additional heterologous portion may be capable of binding to a polynucleotide linker. The additional heterologous portion may be a protein domain. In some embodiments, the additional heterologous portion may be a K Homology (KH) domain, a MS2 coat protein domain, a PP7 coat protein domain, a SfMu Com coat protein domain, a sterile alpha motif, a telomerase Ku binding motif and Ku protein, a telomerase Sm7 binding motif and Sm7 protein, or a RNA recognition motif

[0077] In some embodiments, a base editor system can further comprise an inhibitor of base excision repair (BER) component. It should be appreciated that components of the base editor system may be associated with each other via covalent bonds, noncovalent interactions, or any combination of associations and interactions thereof. The inhibitor of BER component may comprise a BER inhibitor. In some embodiments, the inhibitor of BER can be a uracil DNA glycosylase inhibitor (UGI). In some embodiments, the inhibitor of BER can be an inosine BER inhibitor. In some embodiments, the inhibitor of BER can be targeted to the target nucleotide sequence by the polynucleotide programmable nucleotide binding domain. In some embodiments, a polynucleotide programmable nucleotide binding domain can be fused or linked to an inhibitor of BER. In some embodiments, a polynucleotide programmable nucleotide binding domain can be fused or linked to a deaminase domain and an inhibitor of BER. In some embodiments, a polynucleotide programmable nucleotide binding domain can target an inhibitor of BER to a target nucleotide sequence by non-covalently interacting with or associating with the inhibitor of BER. For example, in some embodiments, the inhibitor of BER component can comprise an additional heterologous portion or domain that is capable of interacting with, associating with, or capable of forming a complex with an additional heterologous portion or domain that is part of a polynucleotide programmable nucleotide binding domain.

[0078] In some embodiments, the inhibitor of BER can be targeted to the target nucleotide sequence by the guide polynucleotide. For example, in some embodiments, the inhibitor of BER can comprise an additional heterologous portion or domain (e.g., polynucleotide binding domain such as an RNA or DNA binding protein) that is capable of interacting with, associating with, or capable of forming a complex with a portion or segment (e.g., a polynucleotide motif) of a guide polynucleotide. In some embodiments, the additional heterologous portion or domain of the guide polynucleotide (e.g., polynucleotide binding domain such as an RNA or DNA binding protein) can be fused or linked to the inhibitor of BER. In some embodiments, the additional heterologous portion may be capable of binding to, interacting with, associating with, or forming a complex with a polynucleotide. In some embodiments, the additional heterologous portion may be capable of binding to a guide polynucleotide. In some embodiments, the additional heterologous portion may be capable of binding to a polypeptide linker. In some embodiments, the additional heterologous portion may be capable of binding to a polynucleotide linker. The additional heterologous portion may be a protein domain. In some embodiments, the additional heterologous portion may be a K Homology (KH) domain, a MS2 coat protein domain, a PP7 coat protein domain, a SfMu Com coat protein domain, a sterile alpha motif, a telomerase Ku binding motif and Ku protein, a telomerase Sm7 binding motif and Sm7 protein, or a RNA recognition motif.

[0079] By “ß-globin (HBB) protein” is meant a polypeptide or fragment thereof having at least about 95% amino acid sequence identity to NCBI Accession No. NP_000509. In particular embodiments, a ß-globin protein comprises one or more alterations relative to the following reference sequence. In one particular embodiment, a ß-globin protein associated with sickle cell disease comprises an E6V (also termed E7V) mutation. An exemplary ß-globin amino acid sequence is provided below.

| (SEQ ID NO: 26) | |
|---|---|
| 1 | MVHLTPEEKS AVTALWGKVN VDEVGGEALG RLLVVYPWTQ RFFESFGDLS TPDAVMGNPK |
| 61 | VKAHGKKVLG AFSDGLAHLD NLKGTFATLS ELHCDKLHVD PENFRLLGNV LVCVLAHHFG |
| 121 | KEFTPPVQAA YQKVVAGVAN ALAHKYH |

[0080] By “HBB polynucleotide” is meant a nucleic acid molecule encoding ß-globin protein or fragment thereof. The sequence of an exemplary HBB polynucleotide, which is available at NCBI Accession No. NM 000518, is provided below:

| (SEQ ID NO: 27) | |
|---|---|
| 1 | acatttgctt ctgacacaac tgtgttcact agcaacctca aacagacacc atggtgcatc |
| 61 | tgactcctga ggagaagtct gccgttactg ccctgtgggg caaggtgaac gtggatgaag |
| 121 | ttggtggtga ggccctgggc aggctgctgg tggtctaccc ttggacccag aggttctttg |
| 181 | agtcctttgg ggatctgtcc actcctgatg ctgttatggg caaccctaag gtgaaggctc |
| 241 | atggcaagaa agtgctcggt gcctttagtg atggcctggc tcacctggac aacctcaagg |
| 301 | gcacctttgc cacactgagt gagctgcact gtgacaagct gcacgtggat cctgagaact |
| 361 | tcaggctcct gggcaacgtg ctggtctgtg tgctggccca tcactttggc aaagaattca |
| 421 | ccccaccagt gcaggctgcc tatcagaaag tggtggctgg tgtggctaat gccctggccc |
| 481 | acaagtatca ctaagctcgc tttcttgctg tccaatttct attaaaggtt cctttgttcc |
| 541 | ctaagtccaa ctactaaact gggggatatt atgaagggcc ttgagcatct ggattctgcc |
| 601 | taataaaaaa catttatttt cattgcaa |

[0081] The term “Cas9” or “Cas9 domain” refers to an RNA-guided nuclease comprising a Cas9 protein, or a fragment thereof (e.g., a protein comprising an active, inactive, or partially active DNA cleavage domain of Cas9, and/or the gRNA binding domain of Cas9). A Cas9 nuclease is also referred to sometimes as a Casnl nuclease or a CRISPR (clustered regularly interspaced short palindromic repeat)-associated nuclease. CRISPR is an adaptive immune system that provides protection against mobile genetic elements (viruses, transposable elements and conjugative plasmids). CRISPR clusters contain spacers, sequences complementary to antecedent mobile elements, and target invading nucleic acids. CRISPR clusters are transcribed and processed into CRISPR RNA (crRNA). In type II CRISPR systems correct processing of pre-crRNA requires a trans-encoded small RNA (tracrRNA), endogenous ribonuclease 3 (mc) and a Cas9 protein. The tracrRNA serves as a guide for ribonuclease 3-aided processing of pre-crRNA. Subsequently, Cas9/crRNA/tracrRNA endonucleolytically cleaves linear or circular dsDNA target complementary to the spacer. The target strand not complementary to crRNA is first cut endonucleolytically, then trimmed 3′-5′ exonucleolytically. In nature, DNA-binding and cleavage typically requires protein and both RNAs. However, single guide RNAs (“sgRNA,” or simply “gNRA”) can be engineered so as to incorporate aspects of both the crRNA and tracrRNA into a single RNA species. See, e.g., Jinek M., Chylinski K., Fonfara I., Hauer M., Doudna J. A., Charpentier E. Science 337:816-821 (2012), the entire contents of which is hereby incorporated by reference. Cas9 recognizes a short motif in the CRISPR repeat sequences (the PAM or protospacer adjacent motif) to help distinguish self versus non-self. Cas9 nuclease sequences and structures are well known to those of skill in the art (see, e.g., “Complete genome sequence of an M1 strain of Streptococcus pyogenes.” Ferretti et al., J. J., McShan W. M., Ajdic D. J., Savic D. J., Savic G., Lyon K., Primeaux C., Sezate S., Suvorov A N., Kenton S., Lai H. S., Lin S. P., Qian Y., Jia H. G., Najar F. Z., Ren Q., Zhu H., Song L., White J., Yuan X., Clifton S. W., Roe B. A., McLaughlin R. E., Proc. Natl. Acad. Sci. U.S.A. 98:4658-4663 (2001); “CRISPR RNA maturation by trans-encoded small RNA and host factor RNase III.” Deltcheva E., Chylinski K., Sharma C. M., Gonzales K., Chao Y., Pirzada Z. A., Eckert M. R., Vogel J., Charpentier E., Nature 471:602-607 (2011); and “A programmable dual-RNA-guided DNA endonuclease in adaptive bacterial immunity.” Jinek M., Chylinski K., Fonfara I., Hauer M., Doudna J. A., Charpentier E. Science 337:816-821 (2012), the entire contents of each of which are incorporated herein by reference). Cas9 orthologs have been described in various species, including, but not limited to, S. pyogenes and S. thermophilus. Additional suitable Cas9 nucleases and sequences will be apparent to those of skill in the art based on this disclosure, and such Cas9 nucleases and sequences include Cas9 sequences from the organisms and loci disclosed in Chylinski, Rhun, and Charpentier, “The tracrRNA and Cas9 families of type II CRISPR-Cas immunity systems” (2013) RNA Biology 10:5, 726-737; the entire contents of which are incorporated herein by reference.

[0082] An exemplary Cas9, is Streptococcus pyogenes Cas9 (spCas9), the amino acid sequence of which is provided below:

(SEQ ID NO: 28)
MDKKYSIGLDIGTNSVGWAVITDDYKVPSKKFKVLGNTDRHSIKKNLI
GALLFGSGETAEATRLKRTARRRYTRRKNRICYLQEIFSNEMAKVDDS
FFHRLEESFLVEEDKKHERHPIFGNIVDEVAYHEKYPTIYHLRKKLAD
STDKADLRLIYLALAHMIKFRGHFLIEGDLNPDNSDVDKLFIQLVQIY
NQLFEENPINASRVDAKAILSARLSKSRRLENLIAQLPGEKRNGLFGN
LIALSLGLTPNFKSNFDLAEDAKLQLSKDTYDDDLDNLLAQIGDQYAD
LFLAAKNLSDAILLSDILRVNSEITKAPLSASMIKRYDEHHQDLTLLK
ALVRQQLPEKYKEIFFDQSKNGYAGYIDGGASQEEFYKFIKPILEKMD
GTEELLVKLNREDLLRKQRTFDNGSIPHQIHLGELHAILRRQEDFYPF
LKDNREKIEKILTFRIPYYVGPLARGNSRFAWMTRKSEETITPWNFEE
VVDKGASAQSFIERMTNFDKNLPNEKVLPKHSLLYEYFTVYNELTKVK
YVTEGMRKPAFLSGEQKKAIVDLLFKTNRKVTVKQLKEDYFKKIECFD
SVEISGVEDRFNASLGAYHDLLKIIKDKDFLDNEENEDILEDIVLTLT
LFEDRGMIEERLKTYAHLFDDKVMKQLKRRRYTGWGRLSRKLINGIRD
KQSGKTILDFLKSDGFANRNFMQLIHDDSLTFKEDIQKAQVSGQGHSL
HEQIANLAGSPAIKKGILQTVKIVDELVKVMGHKPENIVIEMARENQT
TQKGQKNSRERMKRIEEGIKELGSQILKEHPVENTQLQNEKLYLYYLQ
NGRDMYVDQELDINRLSDYDVDHIVPQSFIKDDSIDNKVLTRSDKNRG
KSDNVPSEEVVKKMKNYWRQLLNAKLITQRKFDNLTKAERGGLSELDK
AGFIKRQLVETRQITKHVAQILDSRMNTKYDENDKLIREVKVITLKSK
LVSDFRKDFQFYKVREINNYHHAHDAYLNAVVGTALIKKYPKLESEFV
YGDYKVYDVRKMIAKSEQEIGKATAKYFFYSNIMNFFKTEITLANGEI
RKRPLIETNGETGEIVWDKGRDFATVRKVLSMPQVNIVKKTEVQTGGF
SKESILPKRNSDKLIARKKDWDPKKYGGFDSPTVAYSVLVVAKVEKGK
SKKLKSVKELLGITIMERSSFEKNPIDFLEAKGYKEVKKDLIIKLPKY
SLFELENGRKRMLASAGELQKGNELALPSKYVNFLYLASHYEKLKGSP
EDNEQKQLFVEQHKHYLDEIIEQISEFSKRVILADANLDKVLSAYNKH
RDKPIREQAENIIHLFTLTNLGAPAAFKYFDTTIDRKRYTSTKEVLDA
TLIHQSITGLYETRIDLSQLGGD (single underline: HNH
domain; double underline: RuvC domain)

[0083] A nuclease-inactivated Cas9 protein may interchangeably be referred to as a “dCas9” protein (for nuclease-“dead” Cas9) or catalytically inactive Cas9. Methods for generating a Cas9 protein (or a fragment thereof) having an inactive DNA cleavage domain are known (See, e.g., Jinek et al., Science. 337:816-821 (2012); Qi et al., “Repurposing CRISPR as an RNA-Guided Platform for Sequence-Specific Control of Gene Expression” (2013) Cell. 28; 152(5):1173-83, the entire contents of each of which are incorporated herein by reference). For example, the DNA cleavage domain of Cas9 is known to include two subdomains, the HNH nuclease subdomain and the RuvC1 subdomain. The HNH subdomain cleaves the strand complementary to the gRNA, whereas the RuvC1 subdomain cleaves the non-complementary strand. Mutations within these subdomains can silence the nuclease activity of Cas9. For example, the mutations D10A and H840A completely inactivate the nuclease activity of S. pyogenes Cas9 (Jinek et al., Science. 337:816-821 (2012); Qi et al., Cell. 28; 152(5):1173-83 (2013)). In some embodiments, a Cas9 nuclease has an inactive (e.g., an inactivated) DNA cleavage domain, that is, the Cas9 is a nickase, referred to as an “nCas9” protein (for “nickase” Cas9).

[0084] In some embodiments, proteins comprising fragments of Cas9 are provided. For example, in some embodiments, a protein comprises one of two Cas9 domains: (1) the gRNA binding domain of Cas9; or (2) the DNA cleavage domain of Cas9. In some embodiments, proteins comprising Cas9 or fragments thereof are referred to as “Cas9 variants.” A Cas9 variant shares homology to Cas9, or a fragment thereof. For example, a Cas9 variant is at least about 70% identical, at least about 80% identical, at least about 90% identical, at least about 95% identical, at least about 96% identical, at least about 97% identical, at least about 98% identical, at least about 99% identical, at least about 99.5% identical, or at least about 99.9% identical to wild-type Cas9. In some embodiments, the Cas9 variant may have 1, 2, 3, 4, 5, 6, 7, 8, 9, 10, 11, 12, 13, 14, 15, 16, 17, 18, 19, 20, 21, 22, 21, 24, 25, 26, 27, 28, 29, 30, 31, 32, 33, 34, 35, 36, 37, 38, 39, 40, 41, 42, 43, 44, 45, 46, 47, 48, 49, 50 or more amino acid changes compared to wild-type Cas9. In some embodiments, the Cas9 variant comprises a fragment of Cas9 (e.g., a gRNA binding domain or a DNA-cleavage domain), such that the fragment is at least about 70% identical, at least about 80% identical, at least about 90% identical, at least about 95% identical, at least about 96% identical, at least about 97% identical, at least about 98% identical, at least about 99% identical, at least about 99.5% identical, or at least about 99.9% identical to the corresponding fragment of wild-type Cas9. In some embodiments, the fragment is at least 30%, at least 35%, at least 40%, at least 45%, at least 50%, at least 55%, at least 60%, at least 65%, at least 70%, at least 75%, at least 80%, at least 85%, at least 90%, at least 95% identical, at least 96%, at least 97%, at least 98%, at least 99%, or at least 99.5% of the amino acid length of a corresponding wild-type Cas9.

[0085] In some embodiments, the fragment is at least 100 amino acids in length. In some embodiments, the fragment is at least 100, 150, 200, 250, 300, 350, 400, 450, 500, 550, 600, 650, 700, 750, 800, 850, 900, 950, 1000, 1050, 1100, 1150, 1200, 1250, or at least 1300 amino acids in length. In some embodiments, wild-type Cas9 corresponds to Cas9 from Streptococcus pyogenes (NCBI Reference Sequence: NC_017053.1, nucleotide and amino acid sequences as follows):

(SEQ ID NO: 29)
ATGGATAAGAAATACTCAATAGGCTTAGATATCGGCACAAATAGCGTCGGATGGGCGGTGATCACTGATG
ATTATAAGGTTCCGTCTAAAAAGTTCAAGGTTCTGGGAAATACAGACCGCCACAGTATCAAAAAAAATCT
TATAGGGGCTCTTTTATTTGGCAGTGGAGAGACAGCGGAAGCGACTCGTCTCAAACGGACAGCTCGTAGA
AGGTATACACGTCGGAAGAATCGTATTTGTTATCTACAGGAGATTTTTTCAAATGAGATGGCGAAAGTAG
ATGATAGTTTCTTTCATCGACTTGAAGAGTCTTTTTTGGTGGAAGAAGACAAGAAGCATGAACGTCATCC
TATTTTTGGAAATATAGTAGATGAAGTTGCTTATCATGAGAAATATCCAACTATCTATCATCTGCGAAAA
AAATTGGCAGATTCTACTGATAAAGCGGATTTGCGCTTAATCTATTTGGCCTTAGCGCATATGATTAAGT
TTCGTGGTCATTTTTTGATTGAGGGAGATTTAAATCCTGATAATAGTGATGTGGACAAACTATTTATCCA
GTTGGTACAAATCTACAATCAATTATTTGAAGAAAACCCTATTAACGCAAGTAGAGTAGATGCTAAAGCG
ATTCTTTCTGCACGATTGAGTAAATCAAGACGATTAGAAAATCTCATTGCTCAGCTCCCCGGTGAGAAGA
GAAATGGCTTGTTTGGGAATCTCATTGCTTTGTCATTGGGATTGACCCCTAATTTTAAATCAAATTTTGA
TTTGGCAGAAGATGCTAAATTACAGCTTTCAAAAGATACTTACGATGATGATTTAGATAATTTATTGGCG
CAAATTGGAGATCAATATGCTGATTTGTTTTTGGCAGCTAAGAATTTATCAGATGCTATTTTACTTTCAG
ATATCCTAAGAGTAAATAGTGAAATAACTAAGGCTCCCCTATCAGCTTCAATGATTAAGCGCTACGATGA
ACATCATCAAGACTTGACTCTTTTAAAAGCTTTAGTTCGACAACAACTTCCAGAAAAGTATAAAGAAATC
TTTTTTGATCAATCAAAAAACGGATATGCAGGTTATATTGATGGGGGAGCTAGCCAAGAAGAATTTTATA
AATTTATCAAACCAATTTTAGAAAAAATGGATGGTACTGAGGAATTATTGGTGAAACTAAATCGTGAAGA
TTTGCTGCGCAAGCAACGGACCTTTGACAACGGCTCTATTCCCCATCAAATTCACTTGGGTGAGCTGCAT
GCTATTTTGAGAAGACAAGAAGACTTTTATCCATTTTTAAAAGACAATCGTGAGAAGATTGAAAAAATCT
TGACTTTTCGAATTCCTTATTATGTTGGTCCATTGGCGCGTGGCAATAGTCGTTTTGCATGGATGACTCG
GAAGTCTGAAGAAACAATTACCCCATGGAATTTTGAAGAAGTTGTCGATAAAGGTGCTTCAGCTCAATCA
TTTATTGAACGCATGACAAACTTTGATAAAAATCTTCCAAATGAAAAAGTACTACCAAAACATAGTTTGC
TTTATGAGTATTTTACGGTTTATAACGAATTGACAAAGGTCAAATATGTTACTGAGGGAATGCGAAAACC
AGCATTTCTTTCAGGTGAACAGAAGAAAGCCATTGTTGATTTACTCTTCAAAACAAATCGAAAAGTAACC
GTTAAGCAATTAAAAGAAGATTATTTCAAAAAAATAGAATGTTTTGATAGTGTTGAAATTTCAGGAGTTG
AAGATAGATTTAATGCTTCATTAGGCGCCTACCATGATTTGCTAAAAATTATTAAAGATAAAGATTTTTT
GGATAATGAAGAAAATGAAGATATCTTAGAGGATATTGTTTTAACATTGACCTTATTTGAAGATAGGGGG
ATGATTGAGGAAAGACTTAAAACATATGCTCACCTCTTTGATGATAAGGTGATGAAACAGCTTAAACGTC
GCCGTTATACTGGTTGGGGACGTTTGTCTCGAAAATTGATTAATGGTATTAGGGATAAGCAATCTGGCAA
AACAATATTAGATTTTTTGAAATCAGATGGTTTTGCCAATCGCAATTTTATGCAGCTGATCCATGATGAT
AGTTTGACATTTAAAGAAGATATTCAAAAAGCACAGGTGTCTGGACAAGGCCATAGTTTACATGAACAGA
TTGCTAACTTAGCTGGCAGTCCTGCTATTAAAAAAGGTATTTTACAGACTGTAAAAATTGTTGATGAACT
GGTCAAAGTAATGGGGCATAAGCCAGAAAATATCGTTATTGAAATGGCACGTGAAAATCAGACAACTCAA
AAGGGCCAGAAAAATTCGCGAGAGCGTATGAAACGAATCGAAGAAGGTATCAAAGAATTAGGAAGTCAGA
TTCTTAAAGAGCATCCTGTTGAAAATACTCAATTGCAAAATGAAAAGCTCTATCTCTATTATCTACAAAA
TGGAAGAGACATGTATGTGGACCAAGAATTAGATATTAATCGTTTAAGTGATTATGATGTCGATCACATT
GTTCCACAAAGTTTCATTAAAGACGATTCAATAGACAATAAGGTACTAACGCGTTCTGATAAAAATCGTG
GTAAATCGGATAACGTTCCAAGTGAAGAAGTAGTCAAAAAGATGAAAAACTATTGGAGACAACTTCTAAA
CGCCAAGTTAATCACTCAACGTAAGTTTGATAATTTAACGAAAGCTGAACGTGGAGGTTTGAGTGAACTT
GATAAAGCTGGTTTTATCAAACGCCAATTGGTTGAAACTCGCCAAATCACTAAGCATGTGGCACAAATTT
TGGATAGTCGCATGAATACTAAATACGATGAAAATGATAAACTTATTCGAGAGGTTAAAGTGATTACCTT
AAAATCTAAATTAGTTTCTGACTTCCGAAAAGATTTCCAATTCTATAAAGTACGTGAGATTAACAATTAC
CATCATGCCCATGATGCGTATCTAAATGCCGTCGTTGGAACTGCTTTGATTAAGAAATATCCAAAACTTG
AATCGGAGTTTGTCTATGGTGATTATAAAGTTTATGATGTTCGTAAAATGATTGCTAAGTCTGAGCAAGA
AATAGGCAAAGCAACCGCAAAATATTTCTTTTACTCTAATATCATGAACTTCTTCAAAACAGAAATTACA
CTTGCAAATGGAGAGATTCGCAAACGCCCTCTAATCGAAACTAATGGGGAAACTGGAGAAATTGTCTGGG
ATAAAGGGCGAGATTTTGCCACAGTGCGCAAAGTATTGTCCATGCCCCAAGTCAATATTGTCAAGAAAAC
AGAAGTACAGACAGGCGGATTCTCCAAGGAGTCAATTTTACCAAAAAGAAATTCGGACAAGCTTATTGCT
CGTAAAAAAGACTGGGATCCAAAAAAATATGGTGGTTTTGATAGTCCAACGGTAGCTTATTCAGTCCTAG
TGGTTGCTAAGGTGGAAAAAGGGAAATCGAAGAAGTTAAAATCCGTTAAAGAGTTACTAGGGATCACAAT
TATGGAAAGAAGTTCCTTTGAAAAAAATCCGATTGACTTTTTAGAAGCTAAAGGATATAAGGAAGTTAAA
AAAGACTTAATCATTAAACTACCTAAATATAGTCTTTTTGAGTTAGAAAACGGTCGTAAACGGATGCTGG
CTAGTGCCGGAGAATTACAAAAAGGAAATGAGCTGGCTCTGCCAAGCAAATATGTGAATTTTTTATATTT
AGCTAGTCATTATGAAAAGTTGAAGGGTAGTCCAGAAGATAACGAACAAAAACAATTGTTTGTGGAGCAG
CATAAGCATTATTTAGATGAGATTATTGAGCAAATCAGTGAATTTTCTAAGCGTGTTATTTTAGCAGATG
CCAATTTAGATAAAGTTCTTAGTGCATATAACAAACATAGAGACAAACCAATACGTGAACAAGCAGAAAA
TATTATTCATTTATTTACGTTGACGAATCTTGGAGCTCCCGCTGCTTTTAAATATTTTGATACAACAATT
GATCGTAAACGATATACGTCTACAAAAGAAGTTTTAGATGCCACTCTTATCCATCAATCCATCACTGGTC
TTTATGAAACACGCATTGATTTGAGTCAGCTAGGAGGTGACTGA
(SEQ ID NO: 28)
MDKKYSIGLDIGTNSVGWAVITDDYKVPSKKFKVLGNTDRHSIKKNLIGALLFGSGETAEATRL
KRTARRRYTRRKNRICYLQEIFSNEMAKVDDSFFHRLEESFLVEEDKKHERHPIFGNIVDEVAY
HEKYPTIYHLRKKLADSTDKADLRLIYLALAHMIKFRGHFLIEGDLNPDNSDVDKLFIQLVQIY
NQLFEENPINASRVDAKAILSARLSKSRRLENLIAQLPGEKRNGLFGNLIALSLGLTPNFKSNF
DLAEDAKLQLSKDTYDDDLDNLLAQIGDQYADLFLAAKNLSDAILLSDILRVNSEITKAPLSAS
MIKRYDEHHQDLTLLKALVRQQLPEKYKEIFFDQSKNGYAGYIDGGASQEEFYKFIKPILEKMD
GTEELLVKLNREDLLRKQRTFDNGSIPHQIHLGELHAILRRQEDFYPFLKDNREKIEKILTFRI
PYYVGPLARGNSRFAWMTRKSEETITPWNFEEVVDKGASAQSFIERMTNFDKNLPNEKVLPKHS
LLYEYFTVYNELTKVKYVTEGMRKPAFLSGEQKKAIVDLLFKTNRKVIVKQLKEDYFKKIECFD
SVEISGVEDRFNASLGAYHDLLKIIKDKDFLDNEENEDILEDIVLTLTLFEDRGMIEERLKTYA
HLFDDKVMKQLKRRRYTGWGRLSRKLINGIRDKQSGKTILDFLKSDGFANRNFMQLIHDDSLTF
KEDIQKAQVSGQGHSLHEQIANLAGSPAIKKGILQTVKIVDELVKVMGHKPENIVIEMARENQT
TQKGQKNSRERMKRIEEGIKELGSQILKEHPVENTQLQNEKLYLYYLQNGRDMYVDQELDINRL
SDYDVDHIVPQSFIKDDSIDNKVLTRSDKNRGKSDNVPSEEVVKKMKNYWRQLLNAKLITQRKF
DNLTKAERGGLSELDKAGFIKRQLVETRQITKHVAQILDSRMNTKYDENDKLIREVKVITLKSK
LVSDFRKDFQFYKVREINNYHHAHDAYLNAVVGTALIKKYPKLESEFVYGDYKVYDVRKMIAKS
EQEIGKATAKYFFYSNIMNFFKTEITLANGEIRKRPLIETNGETGEIVWDKGRDFATVRKVLSM
PQVNIVKKTEVQTGGFSKESILPKRNSDKLIARKKDWDPKKYGGFDSPTVAYSVLVVAKVEKGK
SKKLKSVKELLGITIMERSSFEKNPIDFLEAKGYKEVKKDLIIKLPKYSLFELENGRKRMLASA
GELQKGNELALPSKYVNFLYLASHYEKLKGSPEDNEQKQLFVEQHKHYLDEIIEQISEFSKRVI
LADANLDKVLSAYNKHRDKPIREQAENIIHLFTLTNLGAPAAFKYFDTTIDRKRYTSTKEVLDA
TLIHQSITGLYETRIDLSQLGGD
(single underline: HNH domain; double underline: RuvC domain)

[0086] In some embodiments, wild-type Cas9 corresponds to, or comprises the following nucleotide and/or amino acid sequences:

(SEQ ID NO: 30)
ATGGATAAAAAGTATTCTATTGGTTTAGACATCGGCACTAATTCCGTTGGATGGGCTGTCATAA
CCGATGAATACAAAGTACCTTCAAAGAAATTTAAGGTGTTGGGGAACACAGACCGTCATTCGAT
TAAAAAGAATCTTATCGGTGCCCTCCTATTCGATAGTGGCGAAACGGCAGAGGCGACTCGCCTG
AAACGAACCGCTCGGAGAAGGTATACACGTCGCAAGAACCGAATATGTTACTTACAAGAAATTT
TTAGCAATGAGATGGCCAAAGTTGACGATTCTTTCTTTCACCGTTTGGAAGAGTCCTTCCTTGT
CGAAGAGGACAAGAAACATGAACGGCACCCCATCTTTGGAAACATAGTAGATGAGGTGGCATAT
CATGAAAAGTACCCAACGATTTATCACCTCAGAAAAAAGCTAGTTGACTCAACTGATAAAGCGG
ACCTGAGGTTAATCTACTTGGCTCTTGCCCATATGATAAAGTTCCGTGGGCACTTTCTCATTGA
GGGTGATCTAAATCCGGACAACTCGGATGTCGACAAACTGTTCATCCAGTTAGTACAAACCTAT
AATCAGTTGTTTGAAGAGAACCCTATAAATGCAAGTGGCGTGGATGCGAAGGCTATTCTTAGCG
CCCGCCTCTCTAAATCCCGACGGCTAGAAAACCTGATCGCACAATTACCCGGAGAGAAGAAAAA
TGGGTTGTTCGGTAACCTTATAGCGCTCTCACTAGGCCTGACACCAAATTTTAAGTCGAACTTC
GACTTAGCTGAAGATGCCAAATTGCAGCTTAGTAAGGACACGTACGATGACGATCTCGACAATC
TACTGGCACAAATTGGAGATCAGTATGCGGACTTATTTTTGGCTGCCAAAAACCTTAGCGATGC
AATCCTCCTATCTGACATACTGAGAGTTAATACTGAGATTACCAAGGCGCCGTTATCCGCTTCA
ATGATCAAAAGGTACGATGAACATCACCAAGACTTGACACTTCTCAAGGCCCTAGTCCGTCAGC
AACTGCCTGAGAAATATAAGGAAATATTCTTTGATCAGTCGAAAAACGGGTACGCAGGTTATAT
TGACGGCGGAGCGAGTCAAGAGGAATTCTACAAGTTTATCAAACCCATATTAGAGAAGATGGAT
GGGACGGAAGAGTTGCTTGTAAAACTCAATCGCGAAGATCTACTGCGAAAGCAGCGGACTTTCG
ACAACGGTAGCATTCCACATCAAATCCACTTAGGCGAATTGCATGCTATACTTAGAAGGCAGGA
GGATTTTTATCCGTTCCTCAAAGACAATCGTGAAAAGATTGAGAAAATCCTAACCTTTCGCATA
CCTTACTATGTGGGACCCCTGGCCCGAGGGAACTCTCGGTTCGCATGGATGACAAGAAAGTCCG
AAGAAACGATTACTCCATGGAATTTTGAGGAAGTTGTCGATAAAGGTGCGTCAGCTCAATCGTT
CATCGAGAGGATGACCAACTTTGACAAGAATTTACCGAACGAAAAAGTATTGCCTAAGCACAGT
TTACTTTACGAGTATTTCACAGTGTACAATGAACTCACGAAAGTTAAGTATGTCACTGAGGGCA
TGCGTAAACCCGCCTTTCTAAGCGGAGAACAGAAGAAAGCAATAGTAGATCTGTTATTCAAGAC
CAACCGCAAAGTGACAGTTAAGCAATTGAAAGAGGACTACTTTAAGAAAATTGAATGCTTCGAT
TCTGTCGAGATCTCCGGGGTAGAAGATCGATTTAATGCGTCACTTGGTACGTATCATGACCTCC
TAAAGATAATTAAAGATAAGGACTTCCTGGATAACGAAGAGAATGAAGATATCTTAGAAGATAT
AGTGTTGACTCTTACCCTCTTTGAAGATCGGGAAATGATTGAGGAAAGACTAAAAACATACGCT
CACCTGTTCGACGATAAGGTTATGAAACAGTTAAAGAGGCGTCGCTATACGGGCTGGGGACGAT
TGTCGCGGAAACTTATCAACGGGATAAGAGACAAGCAAAGTGGTAAAACTATTCTCGATTTTCT
AAAGAGCGACGGCTTCGCCAATAGGAACTTTATGCAGCTGATCCATGATGACTCTTTAACCTTC
AAAGAGGATATACAAAAGGCACAGGTTTCCGGACAAGGGGACTCATTGCACGAACATATTGCGA
ATCTTGCTGGTTCGCCAGCCATCAAAAAGGGCATACTCCAGACAGTCAAAGTAGTGGATGAGCT
AGTTAAGGTCATGGGACGTCACAAACCGGAAAACATTGTAATCGAGATGGCACGCGAAAATCAA
ACGACTCAGAAGGGGCAAAAAAACAGTCGAGAGCGGATGAAGAGAATAGAAGAGGGTATTAAAG
AACTGGGCAGCCAGATCTTAAAGGAGCATCCTGTGGAAAATACCCAATTGCAGAACGAGAAACT
TTACCTCTATTACCTACAAAATGGAAGGGACATGTATGTTGATCAGGAACTGGACATAAACCGT
TTATCTGATTACGACGTCGATCACATTGTACCCCAATCCTTTTTGAAGGACGATTCAATCGACA
ATAAAGTGCTTACACGCTCGGATAAGAACCGAGGGAAAAGTGACAATGTTCCAAGCGAGGAAGT
CGTAAAGAAAATGAAGAACTATTGGCGGCAGCTCCTAAATGCGAAACTGATAACGCAAAGAAAG
TTCGATAACTTAACTAAAGCTGAGAGGGGTGGCTTGTCTGAACTTGACAAGGCCGGATTTATTA
AACGTCAGCTCGTGGAAACCCGCCAAATCACAAAGCATGTTGCACAGATACTAGATTCCCGAAT
GAATACGAAATACGACGAGAACGATAAGCTGATTCGGGAAGTCAAAGTAATCACTTTAAAGTCA
AAATTGGTGTCGGACTTCAGAAAGGATTTTCAATTCTATAAAGTTAGGGAGATAAATAACTACC
ACCATGCGCACGACGCTTATCTTAATGCCGTCGTAGGGACCGCACTCATTAAGAAATACCCGAA
GCTAGAAAGTGAGTTTGTGTATGGTGATTACAAAGTTTATGACGTCCGTAAGATGATCGCGAAA
AGCGAACAGGAGATAGGCAAGGCTACAGCCAAATACTTCTTTTATTCTAACATTATGAATTTCT
TTAAGACGGAAATCACTCTGGCAAACGGAGAGATACGCAAACGACCTTTAATTGAAACCAATGG
GGAGACAGGTGAAATCGTATGGGATAAGGGCCGGGACTTCGCGACGGTGAGAAAAGTTTTGTCC
ATGCCCCAAGTCAACATAGTAAAGAAAACTGAGGTGCAGACCGGAGGGTTTTCAAAGGAATCGA
TTCTTCCAAAAAGGAATAGTGATAAGCTCATCGCTCGTAAAAAGGACTGGGACCCGAAAAAGTA
CGGTGGCTTCGATAGCCCTACAGTTGCCTATTCTGTCCTAGTAGTGGCAAAAGTTGAGAAGGGA
AAATCCAAGAAACTGAAGTCAGTCAAAGAATTATTGGGGATAACGATTATGGAGCGCTCGTCTT
TTGAAAAGAACCCCATCGACTTCCTTGAGGCGAAAGGTTACAAGGAAGTAAAAAAGGATCTCAT
AATTAAACTACCAAAGTATAGTCTGTTTGAGTTAGAAAATGGCCGAAAACGGATGTTGGCTAGC
GCCGGAGAGCTTCAAAAGGGGAACGAACTCGCACTACCGTCTAAATACGTGAATTTCCTGTATT
TAGCGTCCCATTACGAGAAGTTGAAAGGTTCACCTGAAGATAACGAACAGAAGCAACTTTTTGT
TGAGCAGCACAAACATTATCTCGACGAAATCATAGAGCAAATTTCGGAATTCAGTAAGAGAGTC
ATCCTAGCTGATGCCAATCTGGACAAAGTATTAAGCGCATACAACAAGCACAGGGATAAACCCA
TACGTGAGCAGGCGGAAAATATTATCCATTTGTTTACTCTTACCAACCTCGGCGCTCCAGCCGC
ATTCAAGTATTTTGACACAACGATAGATCGCAAACGATACACTTCTACCAAGGAGGTGCTAGAC
GCGACACTGATTCACCAATCCATCACGGGATTATATGAAACTCGGATAGATTTGTCACAGCTTG
GGGGTGACGGATCCCCCAAGAAGAAGAGGAAAGTCTCGAGCGACTACAAAGACCATGACGGTGA
TTATAAAGATCATGACATCGATTACAAGGATGACGATGACAAGGCTGCAGGA
(SEQ ID NO: 31)
MDKKYSIGLAIGTNSVGWAVITDEYKVPSKKFKVLGNTDRHSIKKNLIGALLFDSGETAEATRL
KRTARRRYTRRKNRICYLQEIFSNEMAKVDDSFFHRLEESFLVEEDKKHERHPIFGNIVDEVAY
HEKYPTIYHLRKKLVDSTDKADLRLIYLALAHMIKFRGHFLIEGDLNPDNSDVDKLFIQLVQTY
NQLFEENPINASGVDAKAILSARLSKSRRLENLIAQLPGEKKNGLFGNLIALSLGLTPNFKSNF
DLAEDAKLQLSKDTYDDDLDNLLAQIGDQYADLFLAAKNLSDAILLSDILRVNTEITKAPLSAS
MIKRYDEHHQDLTLLKALVRQQLPEKYKEIFFDQSKNGYAGYIDGGASQEEFYKFIKPILEKMD
GTEELLVKLNREDLLRKQRTFDNGSIPHQIHLGELHAILRRQEDFYPFLKDNREKIEKILTFRI
PYYVGPLARGNSRFAWMTRKSEETITPWNFEEVVDKGASAQSFIERMTNFDKNLPNEKVLPKHS
LLYEYFTVYNELTKVKYVTEGMRKPAFLSGEQKKAIVDLLFKTNRKVTVKQLKEDYFKKIECFD
SVEISGVEDRFNASLGTYHDLLKIIKDKDFLDNEENEDILEDIVLTLTLFEDREMIEERLKTYA
HLFDDKVMKQLKRRRYTGWGRLSRKLINGIRDKQSGKTILDFLKSDGFANRNFMQLIHDDSLTF
KEDIQKAQVSGQGDSLHEHIANLAGSPAIKKGILQTVKVVDELVKVMGRHKPENIVIEMARENQ
TTQKGQKNSRERMKRIEEGIKELGSQILKEHPVENTQLQNEKLYLYYLQNGRDMYVDQELDINR
LSDYDVDHIVPQSFLKDDSIDNKVLTRSDKNRGKSDNVPSEEVVKKMKNYWRQLLNAKLITQRK
FDNLTKAERGGLSELDKAGFIKRQLVETRQITKHVAQILDSRMNTKYDENDKLIREVKVITLKS
KLVSDFRKDFQFYKVREINNYHHAHDAYLNAVVGTALIKKYPKLESEFVYGDYKVYDVRKMIAK
SEQEIGKATAKYFFYSNIMNFFKTEITLANGEIRKRPLIETNGETGEIVWDKGRDFATVRKVLS
MPQVNIVKKTEVQTGGFSKESILPKRNSDKLIARKKDWDPKKYGGFDSPTVAYSVLVVAKVEKG
KSKKLKSVKELLGITIMERSSFEKNPIDFLEAKGYKEVKKDLIIKLPKYSLFELENGRKRMLAS
AGELQKGNELALPSKYVNFLYLASHYEKLKGSPEDNEQKQLFVEQHKHYLDEIIEQISEFSKRV
ILADANLDKVLSAYNKHRDKPIREQAENIIHLFTLTNLGAPAAFKYFDTTIDRKRYTSTKEVLD
ATLIHQSITGLYETRIDLSQLGGD

(single underline: HNH domain; double underline: RuvC domain)

[0087] In some embodiments, wild-type Cas9 corresponds to Cas9 from Streptococcus pyogenes (NCBI Reference Sequence: NC_002737.2 (nucleotide sequence as follows); and Uniprot Reference Sequence: Q99ZW2 (amino acid sequence as follows):

(SEQ ID NO: 32)
ATGGATAAGAAATACTCAATAGGCTTAGATATCGGCACAAATAGCGTCGGATGGGCGGTGATCA
CTGATGAATATAAGGTTCCGTCTAAAAAGTTCAAGGTTCTGGGAAATACAGACCGCCACAGTAT
CAAAAAAAATCTTATAGGGGCTCTTTTATTTGACAGTGGAGAGACAGCGGAAGCGACTCGTCTC
AAACGGACAGCTCGTAGAAGGTATACACGTCGGAAGAATCGTATTTGTTATCTACAGGAGATTT
TTTCAAATGAGATGGCGAAAGTAGATGATAGTTTCTTTCATCGACTTGAAGAGTCTTTTTTGGT
GGAAGAAGACAAGAAGCATGAACGTCATCCTATTTTTGGAAATATAGTAGATGAAGTTGCTTAT
CATGAGAAATATCCAACTATCTATCATCTGCGAAAAAAATTGGTAGATTCTACTGATAAAGCGG
ATTTGCGCTTAATCTATTTGGCCTTAGCGCATATGATTAAGTTTCGTGGTCATTTTTTGATTGA
GGGAGATTTAAATCCTGATAATAGTGATGTGGACAAACTATTTATCCAGTTGGTACAAACCTAC
AATCAATTATTTGAAGAAAACCCTATTAACGCAAGTGGAGTAGATGCTAAAGCGATTCTTTCTG
CACGATTGAGTAAATCAAGACGATTAGAAAATCTCATTGCTCAGCTCCCCGGTGAGAAGAAAAA
TGGCTTATTTGGGAATCTCATTGCTTTGTCATTGGGTTTGACCCCTAATTTTAAATCAAATTTT
GATTTGGCAGAAGATGCTAAATTACAGCTTTCAAAAGATACTTACGATGATGATTTAGATAATT
TATTGGCGCAAATTGGAGATCAATATGCTGATTTGTTTTTGGCAGCTAAGAATTTATCAGATGC
TATTTTACTTTCAGATATCCTAAGAGTAAATACTGAAATAACTAAGGCTCCCCTATCAGCTTCA
ATGATTAAACGCTACGATGAACATCATCAAGACTTGACTCTTTTAAAAGCTTTAGTTCGACAAC
AACTTCCAGAAAAGTATAAAGAAATCTTTTTTGATCAATCAAAAAACGGATATGCAGGTTATAT
TGATGGGGGAGCTAGCCAAGAAGAATTTTATAAATTTATCAAACCAATTTTAGAAAAAATGGAT
GGTACTGAGGAATTATTGGTGAAACTAAATCGTGAAGATTTGCTGCGCAAGCAACGGACCTTTG
ACAACGGCTCTATTCCCCATCAAATTCACTTGGGTGAGCTGCATGCTATTTTGAGAAGACAAGA
AGACTTTTATCCATTTTTAAAAGACAATCGTGAGAAGATTGAAAAAATCTTGACTTTTCGAATT
CCTTATTATGTTGGTCCATTGGCGCGTGGCAATAGTCGTTTTGCATGGATGACTCGGAAGTCTG
AAGAAACAATTACCCCATGGAATTTTGAAGAAGTTGTCGATAAAGGTGCTTCAGCTCAATCATT
TATTGAACGCATGACAAACTTTGATAAAAATCTTCCAAATGAAAAAGTACTACCAAAACATAGT
TTGCTTTATGAGTATTTTACGGTTTATAACGAATTGACAAAGGTCAAATATGTTACTGAAGGAA
TGCGAAAACCAGCATTTCTTTCAGGTGAACAGAAGAAAGCCATTGTTGATTTACTCTTCAAAAC
AAATCGAAAAGTAACCGTTAAGCAATTAAAAGAAGATTATTTCAAAAAAATAGAATGTTTTGAT
AGTGTTGAAATTTCAGGAGTTGAAGATAGATTTAATGCTTCATTAGGTACCTACCATGATTTGC
TAAAAATTATTAAAGATAAAGATTTTTTGGATAATGAAGAAAATGAAGATATCTTAGAGGATAT
TGTTTTAACATTGACCTTATTTGAAGATAGGGAGATGATTGAGGAAAGACTTAAAACATATGCT
CACCTCTTTGATGATAAGGTGATGAAACAGCTTAAACGTCGCCGTTATACTGGTTGGGGACGTT
TGTCTCGAAAATTGATTAATGGTATTAGGGATAAGCAATCTGGCAAAACAATATTAGATTTTTT
GAAATCAGATGGTTTTGCCAATCGCAATTTTATGCAGCTGATCCATGATGATAGTTTGACATTT
AAAGAAGACATTCAAAAAGCACAAGTGTCTGGACAAGGCGATAGTTTACATGAACATATTGCAA
ATTTAGCTGGTAGCCCTGCTATTAAAAAAGGTATTTTACAGACTGTAAAAGTTGTTGATGAATT
GGTCAAAGTAATGGGGCGGCATAAGCCAGAAAATATCGTTATTGAAATGGCACGTGAAAATCAG
ACAACTCAAAAGGGCCAGAAAAATTCGCGAGAGCGTATGAAACGAATCGAAGAAGGTATCAAAG
AATTAGGAAGTCAGATTCTTAAAGAGCATCCTGTTGAAAATACTCAATTGCAAAATGAAAAGCT
CTATCTCTATTATCTCCAAAATGGAAGAGACATGTATGTGGACCAAGAATTAGATATTAATCGT
TTAAGTGATTATGATGTCGATCACATTGTTCCACAAAGTTTCCTTAAAGACGATTCAATAGACA
ATAAGGTCTTAACGCGTTCTGATAAAAATCGTGGTAAATCGGATAACGTTCCAAGTGAAGAAGT
AGTCAAAAAGATGAAAAACTATTGGAGACAACTTCTAAACGCCAAGTTAATCACTCAACGTAAG
TTTGATAATTTAACGAAAGCTGAACGTGGAGGTTTGAGTGAACTTGATAAAGCTGGTTTTATCA
AACGCCAATTGGTTGAAACTCGCCAAATCACTAAGCATGTGGCACAAATTTTGGATAGTCGCAT
GAATACTAAATACGATGAAAATGATAAACTTATTCGAGAGGTTAAAGTGATTACCTTAAAATCT
AAATTAGTTTCTGACTTCCGAAAAGATTTCCAATTCTATAAAGTACGTGAGATTAACAATTACC
ATCATGCCCATGATGCGTATCTAAATGCCGTCGTTGGAACTGCTTTGATTAAGAAATATCCAAA
ACTTGAATCGGAGTTTGTCTATGGTGATTATAAAGTTTATGATGTTCGTAAAATGATTGCTAAG
TCTGAGCAAGAAATAGGCAAAGCAACCGCAAAATATTTCTTTTACTCTAATATCATGAACTTCT
TCAAAACAGAAATTACACTTGCAAATGGAGAGATTCGCAAACGCCCTCTAATCGAAACTAATGG
GGAAACTGGAGAAATTGTCTGGGATAAAGGGCGAGATTTTGCCACAGTGCGCAAAGTATTGTCC
ATGCCCCAAGTCAATATTGTCAAGAAAACAGAAGTACAGACAGGCGGATTCTCCAAGGAGTCAA
TTTTACCAAAAAGAAATTCGGACAAGCTTATTGCTCGTAAAAAAGACTGGGATCCAAAAAAATA
TGGTGGTTTTGATAGTCCAACGGTAGCTTATTCAGTCCTAGTGGTTGCTAAGGTGGAAAAAGGG
AAATCGAAGAAGTTAAAATCCGTTAAAGAGTTACTAGGGATCACAATTATGGAAAGAAGTTCCT
TTGAAAAAAATCCGATTGACTTTTTAGAAGCTAAAGGATATAAGGAAGTTAAAAAAGACTTAAT
CATTAAACTACCTAAATATAGTCTTTTTGAGTTAGAAAACGGTCGTAAACGGATGCTGGCTAGT
GCCGGAGAATTACAAAAAGGAAATGAGCTGGCTCTGCCAAGCAAATATGTGAATTTTTTATATT
TAGCTAGTCATTATGAAAAGTTGAAGGGTAGTCCAGAAGATAACGAACAAAAACAATTGTTTGT
GGAGCAGCATAAGCATTATTTAGATGAGATTATTGAGCAAATCAGTGAATTTTCTAAGCGTGTT
ATTTTAGCAGATGCCAATTTAGATAAAGTTCTTAGTGCATATAACAAACATAGAGACAAACCAA
TACGTGAACAAGCAGAAAATATTATTCATTTATTTACGTTGACGAATCTTGGAGCTCCCGCTGC
TTTTAAATATTTTGATACAACAATTGATCGTAAACGATATACGTCTACAAAAGAAGTTTTAGAT
GCCACTCTTATCCATCAATCCATCACTGGTCTTTATGAAACACGCATTGATTTGAGTCAGCTAG
GAGGTGACTGA
MDKKYSIGLDIGINSVGWAVITDEYKVPSKKFKVLGNIDRHSIKKNLIGALLFDSGETAEATRL
KRTARRRYTRRKNRICYLQEIFSNEMAKVDDSFFHRLEESFLVEEDKKHERHPIFGNIVDEVAY
HEKYPTIYHLRKKLVDSTDKADLRLIYLALAHMIKFRGHFLIEGDLNPDNSDVDKLFIQLVQTY
NQLFEENPINASGVDAKAILSARLSKSRRLENLIAQLPGEKKNGLFGNLIALSLGLTPNFKSNF
DLAEDAKLQLSKDTYDDDLDNLLAQIGDQYADLFLAAKNLSDAILLSDILRVNTEITKAPLSAS
MIKRYDEHHQDLTLLKALVRQQLPEKYKEIFFDQSKNGYAGYIDGGASQEEFYKFIKPILEKMD
GTEELLVKLNREDLLRKQRTFDNGSIPHQIHLGELHAILRRQEDFYPFLKDNREKIEKILTFRI
PYYVGPLARGNSRFAWMTRKSEETITPWNFEEVVDKGASAQSFIERMTNFDKNLPNEKVLPKHS
LLYEYFTVYNELTKVKYVTEGMRKPAFLSGEQKKAIVDLLFKINRKVIVKQLKEDYFKKIECFD
SVEISGVEDRFNASLGTYHDLLKIIKDKDFLDNEENEDILEDIVLILTLFEDREMIEERLKTYA
HLFDDKVMKQLKRRRYTGWGRLSRKLINGIRDKQSGKTILDFLKSDGFANRNFMQLIHDDSLTF
KEDIQKAQVSGQGDSLHEHIANLAGSPAIKKGILQTVKVVDELVKVMGRHKPENIVIEMARENQ
TTQKGQKNSRERMKRIEEGIKELGSQILKEHPVENTQLQNEKLYLYYLQNGRDMYVDQELDINR
LSDYDVDHIVPQSFLKDDSIDNKVLTRSDKNRGKSDNVPSEEVVKKMKNYWRQLLNAKLITQRK
FDNLTKAERGGLSELDKAGFIKRQLVETRQIIKHVAQILDSRMNTKYDENDKLIREVKVITLKS
KLVSDFRKDFQFYKVREINNYHHAHDAYLNAVVGTALIKKYPKLESEFVYGDYKVYDVRKMIAK
SEQEIGKATAKYFFYSNIMNFFKTEITLANGEIRKRPLIETNGETGEIVWDKGRDFATVRKVLS
MPQVNIVKKTEVQTGGFSKESILPKRNSDKLIARKKDWDPKKYGGFDSPTVAYSVLVVAKVEKG
KSKKLKSVKELLGITIMERSSFEKNPIDFLEAKGYKEVKKDLIIKLPKYSLFELENGRKRMLAS
AGELQKGNELALPSKYVNFLYLASHYEKLKGSPEDNEQKQLFVEQHKHYLDEIIEQISEFSKRV
ILADANLDKVLSAYNKHRDKPIREQAENIIHLFTLTNLGAPAAFKYFDTTIDRKRYTSTKEVLD
ATLIHQSITGLYETRIDLSQLGGD (SEQ ID NO: 1. single underline: HNH
domain; double underline: RuvC domain).

[0088] In some embodiments, Cas9 refers to Cas9 from: Corynebacterium ulcerans (NCBI Refs: NC_015683.1, NC_017317.1); Corynebacterium diphtheria (NCBI Refs: NC_016782.1, NC_016786.1); Spiroplasma syrphidicola (NCBI Ref: NC_021284.1); Prevotella intermedia (NCBI Ref: NC_017861.1); Spiroplasma taiwanense (NCBI Ref: NC_021846.1); Streptococcus iniae (NCBI Ref: NC_021314.1); Belliella baltica (NCBI Ref: NC_018010.1); Psychroflexus torquisl (NCBI Ref: NC_018721.1); Streptococcus thermophilus (NCBI Ref: YP_820832.1), Listeria innocua (NCBI Ref: NP_472073.1), Campylobacter jejuni (NCBI Ref: YP_002344900.1) or Neisseria meningitidis (NCBI Ref: YP_002342100.1) or to a Cas9 from any other organism.

[0089] In some embodiments, the Cas9 is a Neisseria menigitidis Cas9 (NmeCas9) or a variant thereof. In some embodiments, the NmeCas9 has specificity for a NNNNGAYW PAM, wherein Y is C or T and W is A or T. In some embodiments, the NmeCas9 has specificity for a NNNNGYTT PAM, wherein Y is C or T. In some embodiments, the NmeCas9 has specificity for a NNNNGTCT PAM. In some embodiments, the NmeCas9 is a Nme1 Cas9. In some embodiments, the NmeCas9 has specificity for a NNNNGATT PAM, a NNNNCCTA PAM, a NNNNCCTC PAM, a NNNNCCTT PAM, a NNNNCCTG PAM, a NNNNCCGT PAM, a NNNNCCGGPAM, a NNNNCCCA PAM, a NNNNCCCT PAM, a NNNNCCCC PAM, a NNNNCCAT PAM, a NNNNCCAG PAM, a NNNNCCAT PAM, or a NNNGATT PAM. In some embodiments, the Nme1 Cas9 has specificity for a NNNNGATT PAM, a NNNNCCTA PAM, a NNNNCCTC PAM, a NNNNCCTT PAM, or a NNNNCCTG PAM. In some embodiments, the NmeCas9 has specificity for a CAA PAM, a CAAA PAM, or a CCA PAM. In some embodiments, the NmeCas9 is a Nme2 Cas9. In some embodiments, the NmeCas9 has specificity for a NNNNCC (N4CC) PAM, wherein N is any one of A, G, C, or T. in some embodiments, the NmeCas9 has specificity for a NNNNCCGT PAM, a NNNNCCGGPAM, a NNNNCCCA PAM, a NNNNCCCT PAM, a NNNNCCCC PAM, a NNNNCCAT PAM, a NNNNCCAG PAM, a NNNNCCAT PAM, or a NNNGATT PAM. In some embodiments, the NmeCas9 is a Nme3Cas9. In some embodiments, the NmeCas9 has specificity for a NNNNCAAA PAM, a NNNNCC PAM, or a NNNNCNNN PAM. In some embodiments, the PAM-interacting domains for Nme1, Nme2 or Nme3 are N₄GAT, N₄CC, and N₄CAAA, respectively. Additional NmeCas9 features and PAM sequences are described in Edraki et al., A Compact, High-Accuracy Cas9 with a Dinucleotide PAM for In Vivo Genome Editing, Mol. Cell. (2019) 73(4): 714-726, which is incorporated herein by reference in its entirety.

[0090] An exemplary Neisseria meningitidis Cas9 protein, Nme1 Cas9, (NCBI Reference: WP_002235162.1; type II CRISPR RNA-guided endonuclease Cas9) has the following amino acid sequence:

| (SEQ ID NO: 33) | |
|---|---|
| 1 | maafkpnpin yilgldigia svgwamveid edenpiclid lgvrvferae vpktgdslam |
| 61 | arrlarsvrr ltrrrahrll rarrllkreg vlqaadfden glikslpntp wqlraaaldr |
| 121 | kltplewsav llhlikhrgy lsqrkneget adkelgallk gvadnahalq tgdfrtpael |
| 181 | alnkfekesg hirnqrgdys htfsrkdlqa elillfekqk efgnphvsgg lkegietllm |
| 241 | tqrpalsgda vqkmlghctf epaepkaakn tytaerfiwl tklnnlrile qgserpltdt |
| 301 | eratlmdepy rkskltyaqa rkllgledta ffkglrygkd naeastlmem kayhaisral |
| 361 | ekeglkdkks pinlspelqd eigtafslfk tdeditgrlk driqpeilea llkhisfdkf |
| 421 | vqislkalrr ivplmeqgkr ydeacaeiyg dhygkkntee kiylppipad eirnpvvlra |
| 481 | lsqarkving vvrrygspar ihietarevg ksfkdrkeie krqeenrkdr ekaaakfrey |
| 541 | fpnfvgepks kdilklrlye qqhgkclysg keinlgrine kgyveidhal pfsrtwddsf |
| 601 | nnkvlvlgse nqnkgnqtpy eyfngkdnsr ewqefkarve tsrfprskkq rillqkfded |
| 661 | gfkernlndt ryvnrflcqf vadrmrltgk gkkrvfasng qitnllrgfw glrkvraend |
| 721 | rhhaldavvv acstvamqqk itrfvrykem nafdgktidk etgevlhqkt hfpqpweffa |
| 781 | qevmirvfgk pdgkpefeea dtpeklrtll aeklssrpea vheyvtplfv srapnrkmsg |
| 841 | qghmetvksa krldegvsvl rvpltqlklk dlekmvnrer epklyealka rleahkddpa |
| 901 | kafaepfyky dkagnrtqqv kavrveqvqk tgvwvrnhng iadnatmvrv dvfekgdkyy |
| 961 | lvpiyswqva kgilpdravv qgkdeedwql iddsfnfkfs lhpndlvevi tkkarmfgyf |
| 1021 | aschrgtgni nirihdldhk igkngilegi gvktalsfqk yqidelgkei rpcrlkkrpp |
| 1081 | vr |

[0091] Another exemplary Neisseria meningitidis Cas9 protein, Nme2Cas9, (NCBI Reference: WP_002230835; type II CRISPR RNA-guided endonuclease Cas9) has the following amino acid sequence:

| (SEQ ID NO: 34) | |
|---|---|
| 1 | maafkpnpin yilgldigia svgwamveid eeenpirlid lgvrvferae vpktgdslam |
| 61 | arrlarsvrr ltrrrahrll rarrllkreg vlqaadfden glikslpntp wqlraaaldr |
| 121 | kltplewsav llhlikhrgy lsqrkneget adkelgallk gvannahalq tgdfrtpael |
| 181 | alnkfekesg hirnqrgdys htfsrkdlqa elillfekqk efgnphvsgg lkegietllm |
| 241 | tqrpalsgda vqkmlghctf epaepkaakn tytaerfiwl tklnnlrile qgserpltdt |
| 301 | eratlmdepy rkskltyaqa rkllgledta ffkglrygkd naeastlmem kayhaisral |
| 361 | ekeglkdkks pinlsselqd eigtafslfk tdeditgrlk drvqpeilea llkhisfdkf |
| 421 | vqislkalrr ivplmeqgkr ydeacaeiyg dhygkkntee kiylppipad eirnpvvlra |
| 481 | lsgarkving vvrrygspar ihietarevg ksfkdrkeie krqeenrkdr ekaaakfrey |
| 541 | fpnfvgepks kdilklrlye qqhgkclysg keinlvrine kgyveidhal pfsrtwddsf |
| 601 | nnkvlvlgse nqnkgnqtpy eyfngkdnsr ewqefkarve tsrfprskkq rillqkfded |
| 661 | gfkecnlndt ryvnrflcqf vadhilltgk gkrrvfasng qitnllrgfw glrkvraend |
| 721 | rhhaldavvv acstvamqqk itrfvrykem nafdgktidk etgkvlhqkt hfpqpweffa |
| 781 | qevmirvfgk pdgkpefeea dtpeklrtll aeklssrpea vheyvtplfv srapnrkmsg |
| 841 | ahkdtlrsak rfvkhnekis vkrvwlteik ladlenmvny kngreielye alkarleayg |
| 901 | gnakqafdpk dnpfykkggq lvkavrvekt qesgvllnkk naytiadngd mvrvdvfckv |
| 961 | dkkgknqyfi vpiyawqvae nilpdidckg yriddsytfc fslhkydlia fqkdekskve |
| 1021 | fayyincdss ngrfylawhd kgskeqqfri stqnlvliqk yqvnelgkei rpcrlkkrpp |
| 1081 | vr |

[0092] In some embodiments, dCas9 corresponds to, or comprises in part or in whole, a Cas9 amino acid sequence having one or more mutations that inactivate the Cas9 nuclease activity. For example, in some embodiments, a dCas9 domain comprises D10A and an H840A mutation or corresponding mutations in another Cas9. In some embodiments, the dCas9 comprises the amino acid sequence of dCas9 (D10A and H840A):

(SEQ ID NO: 35)
MDKKYSIGLAIGTNSVGWAVITDEYKVPSKKFKVLGNTDRHSIKKNLIGALLFDSGETAEATRL
KRTARRRYTRRKNRICYLQEIFSNEMAKVDDSFFHRLEESFLVEEDKKHERHPIFGNIVDEVAY
HEKYPTIYHLRKKLVDSTDKADLRLIYLALAHMIKFRGHFLIEGDLNPDNSDVDKLFIQLVQTY
NQLFEENPINASGVDAKAILSARLSKSRRLENLIAQLPGEKKNGLFGNLIALSLGLTPNFKSNF
DLAEDAKLQLSKDTYDDDLDNLLAQIGDQYADLFLAAKNLSDAILLSDILRVNTEITKAPLSAS
MIKRYDEHHQDLTLLKALVRQQLPEKYKEIFFDQSKNGYAGYIDGGASQEEFYKFIKPILEKMD
GTEELLVKLNREDLLRKQRTFDNGSIPHQIHLGELHAILRRQEDFYPFLKDNREKIEKILTFRI
PYYVGPLARGNSRFAWMTRKSEETITPWNFEEVVDKGASAQSFIERMTNFDKNLPNEKVLPKHS
LLYEYFTVYNELTKVKYVTEGMRKPAFLSGEQKKAIVDLLFKINRKVIVKQLKEDYFKKIECFD
SVEISGVEDRFNASLGTYHDLLKIIKDKDFLDNEENEDILEDIVLTLTLFEDREMIEERLKTYA
HLFDDKVMKQLKRRRYTGWGRLSRKLINGIRDKQSGKTILDFLKSDGFANRNFMQLIHDDSLTF
KEDIQKAQVSGQGDSLHEHIANLAGSPAIKKGILQTVKVVDELVKVMGRHKPENIVIEMARENQ
TTQKGQKNSRERMKRIEEGIKELGSQILKEHPVENTQLQNEKLYLYYLQNGRDMYVDQELDINR
LSDYDVDAIVPQSFLKDDSIDNKVLTRSDKNRGKSDNVPSEEVVKKMKNYWRQLLNAKLITQRK
FDNLTKAERGGLSELDKAGFIKRQLVETRQIIKHVAQILDSRMNTKYDENDKLIREVKVITLKS
KLVSDFRKDFQFYKVREINNYHHAHDAYLNAVVGTALIKKYPKLESEFVYGDYKVYDVRKMIAK
SEQEIGKATAKYFFYSNIMNFFKTEITLANGEIRKRPLIETNGETGEIVWDKGRDFATVRKVLS
MPQVNIVKKTEVQTGGFSKESILPKRNSDKLIARKKDWDPKKYGGFDSPTVAYSVLVVAKVEKG
KSKKLKSVKELLGITIMERSSFEKNPIDFLEAKGYKEVKKDLIIKLPKYSLFELENGRKRMLAS
AGELQKGNELALPSKYVNFLYLASHYEKLKGSPEDNEQKQLFVEQHKHYLDEIIEQISEFSKRV
ILADANLDKVLSAYNKHRDKPIREQAENITHLFTLTNLGAPAAFKYFDTTIDRKRYTSTKEVLD
ATLIHQSITGLYETRIDLSQLGGD
(single underline: HNH domain; double underline: RuvC domain).

[0093] In some embodiments, the Cas9 domain comprises a D10A mutation, while the residue at position 840 remains a histidine in the amino acid sequence provided above, or at corresponding positions in any of the amino acid sequences provided herein.

[0094] In other embodiments, dCas9 variants having mutations other than D10A and H840A are provided, which, e.g., result in nuclease inactivated Cas9 (dCas9). Such mutations, by way of example, include other amino acid substitutions at D10 and H840, or other substitutions within the nuclease domains of Cas9 (e.g., substitutions in the HNH nuclease subdomain and/or the RuvC1 subdomain). In some embodiments, variants or homologues of dCas9 are provided which are at least about 70% identical, at least about 80% identical, at least about 90% identical, at least about 95% identical, at least about 98% identical, at least about 99% identical, at least about 99.5% identical, or at least about 99.9% identical. In some embodiments, variants of dCas9 are provided having amino acid sequences which are shorter, or longer, by about 5 amino acids, by about 10 amino acids, by about 15 amino acids, by about 20 amino acids, by about 25 amino acids, by about 30 amino acids, by about 40 amino acids, by about 50 amino acids, by about 75 amino acids, by about 100 amino acids or more.

[0095] In some embodiments, Cas9 fusion proteins as provided herein comprise the full-length amino acid sequence of a Cas9 protein, e.g., one of the Cas9 sequences provided herein. In other embodiments, however, fusion proteins as provided herein do not comprise a full-length Cas9 sequence, but only one or more fragments thereof. Exemplary amino acid sequences of suitable Cas9 domains and Cas9 fragments are provided herein, and additional suitable sequences of Cas9 domains and fragments will be apparent to those of skill in the art.

[0096] It should be appreciated that additional Cas9 proteins (e.g., a nuclease dead Cas9 (dCas9), a Cas9 nickase (nCas9), or a nuclease active Cas9), including variants and homologs thereof, are within the scope of this disclosure. Exemplary Cas9 proteins include, without limitation, those provided below. In some embodiments, the Cas9 protein is a nuclease dead Cas9 (dCas9). In some embodiments, the Cas9 protein is a Cas9 nickase (nCas9). In some embodiments, the Cas9 protein is a nuclease active Cas9.

Exemplary Catalytically Inactive Cas9 (dCas9):

(SEQ ID NO: 36)
DKKYSIGLAIGTNSVGWAVITDEYKVPSKKFKVLGNTDRHSIKKNLIGALL
FDSGETAEATRLKRTARRRYTRRKNRICYLQEIFSNEMAKVDDSFFHRLEE
SFLVEEDKKHERHPIFGNIVDEVAYHEKYPTIYHLRKKLVDSTDKADLRLI
YLALAHMIKFRGHFLIEGDLNPDNSDVDKLFIQLVQTYNQLFEENPINASG
VDAKAILSARLSKSRRLENLIAQLPGEKKNGLFGNLIALSLGLTPNFKSNF
DLAEDAKLQLSKDTYDDDLDNLLAQIGDQYADLFLAAKNLSDAILLSDILR
VNTEITKAPLSASMIKRYDEHHQDLTLLKALVRQQLPEKYKEIFFDQSKNG
YAGYIDGGASQEEFYKFIKPILEKMDGTEELLVKLNREDLLRKQRTFDNGS
IPHQIHLGELHAILRRQEDFYPFLKDNREKIEKILTFRIPYYVGPLARGNS
RFAWMTRKSEETITPWNFEEVVDKGASAQSFIERMTNFDKNLPNEKVLPKH
SLLYEYFTVYNELTKVKYVTEGMRKPAFLSGEQKKAIVDLLFKTNRKVTVK
QLKEDYFKKIECFDSVEISGVEDRFNASLGTYHDLLKIIKDKDFLDNEENE
DILEDIVLTLTLFEDREMIEERLKTYAHLFDDKVMKQLKRRRYTGWGRLSR
KLINGIRDKQSGKTILDFLKSDGFANRNFMQLIHDDSLTFKEDIQKAQVSG
QGDSLHEHIANLAGSPAIKKGILQTVKVVDELVKVMGRHKPENIVIEMARE
NQTTQKGQKNSRERMKRIEEGIKELGSQILKEHPVENTQLQNEKLYLYYLQ
NGRDMYVDQELDINRLSDYDVDAIVPQSFLKDDSIDNKVLTRSDKNRGKSD
NVPSEEVVKKMKNYWRQLLNAKLITQRKFDNLTKAERGGLSELDKAGFIKR
QLVETRQITKHVAQILDSRMNTKYDENDKLIREVKVITLKSKLVSDFRKDF
QFYKVREINNYHHAHDAYLNAVVGTALIKKYPKLESEFVYGDYKVYDVRKM
IAKSEQEIGKATAKYFFYSNIMNFFKTEITLANGEIRKRPLIETNGETGEI
VWDKGRDFATVRKVLSMPQVNIVKKTEVQTGGFSKESILPKRNSDKLIARK
KDWDPKKYGGFDSPTVAYSVLVVAKVEKGKSKKLKSVKELLGITIMERSSF
EKNPIDFLEAKGYKEVKKDLIIKLPKYSLFELENGRKRMLASAGELQKGNE
LALPSKYVNFLYLASHYEKLKGSPEDNEQKQLFVEQHKHYLDEIIEQISEF
SKRVILADANLDKVLSAYNKHRDKPIREQAENIIHLFTLTNLGAPAAFKYF
DTTIDRKRYTSTKEVLDATLIHQSITGLYETRIDLSQLGGD

Exemplary Catalytically Cas9 Nickase (nCas9):

(SEQ ID NO: 37)
DKKYSIGLAIGTNSVGWAVITDEYKVPSKKFKVLGNTDRHSIKKNLIGALL
FDSGETAEATRLKRTARRRYTRRKNRICYLQEIFSNEMAKVDDSFFHRLEE
SFLVEEDKKHERHPIFGNIVDEVAYHEKYPTIYHLRKKLVDSTDKADLRLI
YLALAHMIKFRGHFLIEGDLNPDNSDVDKLFIQLVQTYNQLFEENPINASG
VDAKAILSARLSKSRRLENLIAQLPGEKKNGLFGNLIALSLGLTPNFKSNF
DLAEDAKLQLSKDTYDDDLDNLLAQIGDQYADLFLAAKNLSDAILLSDILR
VNTEITKAPLSASMIKRYDEHHQDLTLLKALVRQQLPEKYKEIFFDQSKNG
YAGYIDGGASQEEFYKFIKPILEKMDGTEELLVKLNREDLLRKQRTFDNGS
IPHQIHLGELHAILRRQEDFYPFLKDNREKIEKILTFRIPYYVGPLARGNS
RFAWMTRKSEETITPWNFEEVVDKGASAQSFIERMTNFDKNLPNEKVLPKH
SLLYEYFTVYNELTKVKYVTEGMRKPAFLSGEQKKAIVDLLFKTNRKVTVK
QLKEDYFKKIECFDSVEISGVEDRFNASLGTYHDLLKIIKDKDFLDNEENE
DILEDIVLTLTLFEDREMIEERLKTYAHLFDDKVMKQLKRRRYTGWGRLSR
KLINGIRDKQSGKTILDFLKSDGFANRNFMQLIHDDSLTFKEDIQKAQVSG
QGDSLHEHIANLAGSPAIKKGILQTVKVVDELVKVMGRHKPENIVIEMARE
NQTTQKGQKNSRERMKRIEEGIKELGSQILKEHPVENTQLQNEKLYLYYLQ
NGRDMYVDQELDINRLSDYDVDHIVPQSFLKDDSIDNKVLTRSDKNRGKSD
NVPSEEVVKKMKNYWRQLLNAKLITQRKFDNLTKAERGGLSELDKAGFIKR
QLVETRQITKHVAQILDSRMNTKYDENDKLIREVKVITLKSKLVSDFRKDF
QFYKVREINNYHHAHDAYLNAVVGTALIKKYPKLESEFVYGDYKVYDVRKM
IAKSEQEIGKATAKYFFYSNIMNFFKTEITLANGEIRKRPLIETNGETGEI
VWDKGRDFATVRKVLSMPQVNIVKKTEVQTGGFSKESILPKRNSDKLIARK
KDWDPKKYGGFDSPTVAYSVLVVAKVEKGKSKKLKSVKELLGITIMERSSF
EKNPIDFLEAKGYKEVKKDLIIKLPKYSLFELENGRKRMLASAGELQKGNE
LALPSKYVNFLYLASHYEKLKGSPEDNEQKQLFVEQHKHYLDEIIEQISEF
SKRVILADANLDKVLSAYNKHRDKPIREQAENIIHLFTLTNLGAPAAFKYF
DTTIDRKRYTSTKEVLDATLIHQSITGLYETRIDLSQLGGD

### Exemplary Catalytically Active Cas9:

(SEQ ID NO: 38)
DKKYSIGLDIGTNSVGWAVITDEYKVPSKKFKVLGNTDRHSIKKNLIGALL
FDSGETAEATRLKRTARRRYTRRKNRICYLQEIFSNEMAKVDDSFFHRLEE
SFLVEEDKKHERHPIFGNIVDEVAYHEKYPTIYHLRKKLVDSTDKADLRLI
YLALAHMIKFRGHFLIEGDLNPDNSDVDKLFIQLVQTYNQLFEENPINASG
VDAKAILSARLSKSRRLENLIAQLPGEKKNGLFGNLIALSLGLTPNFKSNF
DLAEDAKLQLSKDTYDDDLDNLLAQIGDQYADLFLAAKNLSDAILLSDILR
VNTEITKAPLSASMIKRYDEHHQDLTLLKALVRQQLPEKYKEIFFDQSKNG
YAGYIDGGASQEEFYKFIKPILEKMDGTEELLVKLNREDLLRKQRTFDNGS
IPHQIHLGELHAILRRQEDFYPFLKDNREKIEKILTFRIPYYVGPLARGNS
RFAWMTRKSEETITPWNFEEVVDKGASAQSFIERMTNFDKNLPNEKVLPKH
SLLYEYFTVYNELTKVKYVTEGMRKPAFLSGEQKKAIVDLLFKTNRKVTVK
QLKEDYFKKIECFDSVEISGVEDRFNASLGTYHDLLKIIKDKDFLDNEENE
DILEDIVLTLTLFEDREMIEERLKTYAHLFDDKVMKQLKRRRYTGWGRLSR
KLINGIRDKQSGKTILDFLKSDGFANRNFMQLIHDDSLTFKEDIQKAQVSG
QGDSLHEHIANLAGSPAIKKGILQTVKVVDELVKVMGRHKPENIVIEMARE
NQTTQKGQKNSRERMKRIEEGIKELGSQILKEHPVENTQLQNEKLYLYYLQ
NGRDMYVDQELDINRLSDYDVDHIVPQSFLKDDSIDNKVLTRSDKNRGKSD
NVPSEEVVKKMKNYWRQLLNAKLITQRKFDNLTKAERGGLSELDKAGFIKR
QLVETRQITKHVAQILDSRMNTKYDENDKLIREVKVITLKSKLVSDFRKDF
QFYKVREINNYHHAHDAYLNAVVGTALIKKYPKLESEFVYGDYKVYDVRKM
IAKSEQEIGKATAKYFFYSNIMNFFKTEITLANGEIRKRPLIETNGETGEI
VWDKGRDFATVRKVLSMPQVNIVKKTEVQTGGFSKESILPKRNSDKLIARK
KDWDPKKYGGFDSPTVAYSVLVVAKVEKGKSKKLKSVKELLGITIMERSSF
EKNPIDFLEAKGYKEVKKDLIIKLPKYSLFELENGRKRMLASAGELQKGNE
LALPSKYVNFLYLASHYEKLKGSPEDNEQKQLFVEQHKHYLDEIIEQISEF
SKRVILADANLDKVLSAYNKHRDKPIREQAENIIHLFTLTNLGAPAAFKYF
DTTIDRKRYTSTKEVLDATLIHQSITGLYETRIDLSQLGGD.

[0098] In some embodiments, Cas9 refers to a Cas9 from archaea (e.g. nanoarchaea), which constitute a domain and kingdom of single-celled prokaryotic microbes. In some embodiments, Cas9 refers to CasX or CasY, which have been described in, for example, Burstein et al., “New CRISPR-Cas systems from uncultivated microbes.” Cell Res. 2017 Feb. 21. doi: 10.1038/cr.2017.21, the entire contents of which is hereby incorporated by reference. Using genome-resolved metagenomics, a number of CRISPR-Cas systems were identified, including the first reported Cas9 in the archaeal domain of life. This divergent Cas9 protein was found in little-studied nanoarchaea as part of an active CRISPR-Cas system. In bacteria, two previously unknown systems were discovered, CRISPR-CasX and CRISPR-CasY, which are among the most compact systems yet discovered. In some embodiments, Cas9 refers to CasX, or a variant of CasX. In some embodiments, Cas9 refers to a CasY, or a variant of CasY. It should be appreciated that other RNA-guided DNA binding proteins may be used as a nucleic acid programmable DNA binding protein (napDNAbp) and are within the scope of this disclosure.

[0099] In some embodiments, the Cas9 is a Cas9 variant having specificity for an altered PAM sequence. In some embodiments, the Additional Cas9 variants and PAM sequences are described in Miller et al., Continuous evolution of SpCas9 variants compatible with non-G PAMs. Nat Biotechnol (2020), doi.org/10.1038/s41587-020-0412-8, the entirety of which is incorporated herein by reference. In some embodiments, a Cas9 variant has no specific PAM requirements. In some embodiments, a Cas9 variant, e.g., a SpCas9 variant has specificity for a NRNH PAM, wherein R is A or G and H is A, C, or T. In some embodiments, the SpCas9 variant has specificity for a PAM sequence AAA, TAA, CAA, GAA, TAT, GAT, or CAC. In some embodiments, the SpCas9 variant comprises an amino acid substitution at position 1114, 1134, 1135, 1137, 1139, 1151, 1180, 1188, 1211, 1218, 1219, 1221, 1249, 1256, 1264, 1290, 1318, 1317, 1320, 1321, 1323, 1332, 1333, 1335, 1337, or 1339 as numbered relative to the below reference sequence, or a corresponding position thereof.

(SEQ ID NO: 1)
MDKKYSIGLDIGTNSVGWAVITDEYKVPSKKFKVLGNTDRHSIKKNLIGALLFDSGETA
EATRLKRTARRRYTRRKNRICYLQEIFSNEMAKVDDSFFHRLEESFLVEEDKKHERHPIF
GNIVDEVAYHEKYPTIYHLRKKLVDSTDKADLRLIYLALAHMIKFRGHFLIEGDLNPDN
SDVDKLFIQLVQTYNQLFEENPINASGVDAKAILSARLSKSRRLENLIAQLPGEKKNGLF
GNLIALSLGLTPNFKSNFDLAEDAKLQLSKDTYDDDLDNLLAQIGDQYADLFLAAKNLS
DAILLSDILRVNTEITKAPLSASMIKRYDEHHQDLTLLKALVRQQLPEKYKEIFFDQSKN
GYAGYIDGGASQEEFYKFIKPILEKMDGTEELLVKLNREDLLRKQRTFDNGSIPHQIHLG
ELHAILRRQEDFYPFLKDNREKIEKILTFRIPYYVGPLARGNSRFAWMTRKSEETITPWN
FEEVVDKGASAQSFIERMTNFDKNLPNEKVLPKHSLLYEYFTVYNELTKVKYVTEGMR
KPAFLSGEQKKAIVDLLFKTNRKVTVKQLKEDYFKKIECFDSVEISGVEDRFNASLGTY
HDLLKIIKDKDFLDNEENEDILEDIVLTLTLFEDREMIEERLKTYAHLFDDKVMKQLKRR
RYTGWGRLSRKLINGIRDKQSGKTILDFLKSDGFANRNFMQLIHDDSLTFKEDIQKAQV
SGQGDSLHEHIANLAGSPAIKKGILQTVKVVDELVKVMGRHKPENIVIEMARENQTTQK
GQKNSRERMKRIEEGIKELGSQILKEHPVENTQLQNEKLYLYYLQNGRDMYVDQELDI
NRLSDYDVDHIVPQSFLKDDSIDNKVLTRSDKNRGKSDNVPSEEVVKKMKNYWRQLL
NAKLITQRKFDNLTKAERGGLSELDKAGFIKRQLVETRQITKHVAQILDSRMNTKYDEN
DKLIREVKVITLKSKLVSDFRKDFQFYKVREINNYHHAHDAYLNAVVGTALIKKYPKLE
SEFVYGDYKVYDVRKMIAKSEQEIGKATAKYFFYSNIMNFFKTEITLANGEIRKRPLIET
NGETGEIVWDKGRDFATVRKVLSMPQVNIVKKTEVQTGGFSKESILPKRNSDKLIARKK
DWDPKKYGGFDSPTVAYSVLVVAKVEKGKSKKLKSVKELLGITIMERSSFEKNPIDFLE
AKGYKEVKKDLIIKLPKYSLFELENGRKRMLASAGELQKGNELALPSKYVNFLYLASH
YEKLKGSPEDNEQKQLFVEQHKHYLDEIIEQISEFSKRVILADANLDKVLSAYNKHRDK
PIREQAENIIHLFTLTNLGAPAAFKYFDTTIDRKRYTSTKEVLDATLIHQSITGLYETRIDL
SQLGGD (single underline: HNH domain; double underline: RuvC domain).

[0100] In some embodiments, the SpCas9 variant comprises an amino acid substitution at position 1114, 1135, 1218, 1219, 1221, 1249, 1320, 1321, 1323, 1332, 1333, 1335, or 1337 as numbered relative to the above reference sequence, or a corresponding position thereof. In some embodiments, the SpCas9 variant comprises an amino acid substitution at position 1114, 1134, 1135, 1137, 1139, 1151, 1180, 1188, 1211, 1219, 1221, 1256, 1264, 1290, 1318, 1317, 1320, 1323, 1333 as numbered relative to the above reference sequence, or a corresponding position thereof. In some embodiments, the SpCas9 variant comprises an amino acid substitution at position 1114, 1131, 1135, 1150, 1156, 1180, 1191, 1218, 1219, 1221, 1227, 1249, 1253, 1286, 1293, 1320, 1321, 1332, 1335, 1339 as numbered relative to the above reference sequence, or a corresponding position thereof. In some embodiments, the SpCas9 variant comprises an amino acid substitution at position 1114, 1127, 1135, 1180, 1207, 1219, 1234, 1286, 1301, 1332, 1335, 1337, 1338, 1349 as numbered relative to the above reference sequence. Exemplary amino acid substitutions and PAM specificity of SpCas9 variants are shown in the below Tables A-D and FIG. 49.

TABLE A

| | SpCas9 amino acid position | | | | | | | | | | | | |
|---|---|---|---|---|---|---|---|---|---|---|---|---|---|
| | 1114 | 1135 | 1218 | 1219 | 1221 | 1249 | 1320 | 1321 | 1323 | 1332 | 1333 | 1335 | 1337 |
| SpCas9 | R | D | G | E | Q | P | A | P | A | D | R | R | T |
| AAA | | N | | V | H | | | | | | G | | |
| AAA | | N | | V | H | | | | | | G | | |
| AAA | | | | V | | | | | | | G | | |
| TAA | G | N | | V | | | | | | | I | | |
| TAA | | N | | V | | | | | | | I | | A |
| TAA | G | N | | V | | | | | | | I | | A |
| CAA | | | | V | | | | | | | K | | |
| CAA | | N | | V | | | | | | | K | | |
| CAA | | N | | V | | | | | | | K | | |
| GAA | | | | V | H | | V | | | | K | | |
| GAA | | N | | V | | | V | | | | K | | |
| GAA | | | | V | H | | V | | | | K | | |
| TAT | | | S | V | H | S | | S | | | | L | |
| TAT | | | S | V | H | S | | S | | | | L | |
| TAT | | | S | V | H | S | | S | | | | L | |
| GAT | | | | V | | | | | | | I | | |
| GAT | | | | V | | | | | D | | | Q | |
| GAT | | | | V | | | | | D | | | Q | |
| CAC | | | | V | | | | | | N | | Q | N |
| CAC | | N | | V | | | | | | | | Q | N |
| CAC | | | | V | | | | | | N | | Q | N |

TABLE B

| | SpCas9 amino acid position | | | | | | | | | | | | | | | | | | |
|---|---|---|---|---|---|---|---|---|---|---|---|---|---|---|---|---|---|---|---|
| | 1114 | 1134 | 1135 | 1137 | 1139 | 1151 | 1180 | 1188 | 1211 | 1219 | 1221 | 1256 | 1264 | 1290 | 1318 | 1317 | 1320 | 1323 | 1333 |
| SpCas9 | R | F | D | P | V | K | D | K | K | E | Q | Q | H | V | L | N | A | A | R |
| GAA | | | | | | | | | | V | H | | | | | | V | | K |
| GAA | | | N | S | | | | | | V | | | | | | | V | D | K |
| GAA | | | N | | | | | | | V | H | | Y | | | | V | | K |
| CAA | | | N | | | | | | | V | H | | Y | | | | V | | K |
| CAA | G | | N | S | | | | | | V | H | | Y | | | | V | | K |
| CAA | | | N | | | | | R | | V | H | | | | | | V | | K |
| CAA | | | N | | | | G | | R | V | H | | Y | | | | V | | K |
| CAA | | | N | | | | | | | V | H | | Y | | | | V | | K |
| AAA | | | N | | | | G | | | V | H | R | Y | | | | V | D | K |
| CAA | G | | N | | | | G | | | V | H | | Y | | | | V | D | K |
| CAA | | L | N | | | | G | | | V | H | | Y | | | T | V | D | K |
| TAA | G | | N | | | | G | | | V | H | | Y | G | S | | V | D | K |
| TAA | G | | N | | | E | G | | | V | H | | Y | | S | | V | | K |
| TAA | G | | N | | | | G | | | V | H | | Y | | S | | V | D | K |
| TAA | G | | N | | | | G | | R | V | H | | | | | | V | | K |
| TAA | | | N | | | | G | | R | V | H | | Y | | | | V | | K |
| TAA | G | | N | | A | | G | | | V | H | | | | | | V | | K |
| TAA | G | | N | | | | | | | V | H | | | | | | V | | K |

TABLE C

| | SpCas9 amino acid position | | | | | | | | | |
|---|---|---|---|---|---|---|---|---|---|---|
| | 1114 | 1131 | 1135 | 1150 | 1156 | 1180 | 1191 | 1218 | 1219 | 1221 |
| SpCas9 | R | Y | D | E | K | D | K | G | E | Q |
| SacB.TAT | | | N | | | | N | | V | H |
| SacB.TAT | | | N | | | | | S | V | H |
| AAT | | | N | | | | | S | V | H |
| TAT | G | | N | | | G | | S | V | H |
| TAT | G | | N | | | G | | S | V | H |
| TAT | G | C | N | | | G | | S | V | H |
| TAT | G | C | N | | | G | | S | V | H |
| TAT | G | C | N | | | G | | S | V | H |
| TAT | G | C | N | | E | G | | S | V | H |
| TAT | G | C | N | V | | G | | S | V | H |
| TAT | | C | N | | | G | | S | V | H |
| TAT | G | C | N | | | G | | S | V | H |

| | SpCas9 amino acid position | | | | | | | | | |
|---|---|---|---|---|---|---|---|---|---|---|
| | 1227 | 1249 | 1253 | 1286 | 1293 | 1320 | 1321 | 1332 | 1335 | 1339 |
| SpCas9 | A | P | E | N | A | A | P | D | R | T |
| SacB.TAT | | | | | | V | S | | L | |
| SacB.TAT | | S | | | | | S | G | L | |
| AAT | V | S | | K | T | | S | G | L | I |
| TAT | | S | K | | | | S | G | L | |
| TAT | | S | | | | | S | G | L | |
| TAT | | S | | | | | S | G | L | |
| TAT | | S | | | | | S | G | L | |
| TAT | | S | | | | | S | G | L | |
| TAT | | S | | | | | S | G | L | |
| TAT | | S | | | | | S | G | L | |
| TAT | | S | | | | | S | G | L | |
| TAT | | S | | | | | S | G | L | |

TABLE D

| | SpCas9 amino acid position | | | | | | | | | | | | | |
|---|---|---|---|---|---|---|---|---|---|---|---|---|---|---|
| | 1114 | 1127 | 1135 | 1180 | 1207 | 1219 | 1234 | 1286 | 1301 | 1332 | 1335 | 1337 | 1338 | 1349 |
| SpCas9 | R | D | D | D | E | E | N | N | P | D | R | T | S | H |

| | | | | | | | | | | | | | |
|---|---|---|---|---|---|---|---|---|---|---|---|---|---|
| SacB.CAC | | | N | | | V | | | N | Q | N | | |
| AAC | G | | N | | | V | | | N | Q | N | | |
| AAC | G | | N | | | V | | | N | Q | N | | |
| TAC | G | | N | | | V | | | N | Q | N | | |
| TAC | G | | N | | | V | | H | N | Q | N | | |
| TAC | G | | N | | G | V | D | H | N | Q | N | | |
| TAC | G | | N | | | V | | | N | Q | N | | |
| TAC | G | G | N | E | | V | | H | N | Q | N | | |
| TAC | G | | N | | | V | | H | N | Q | N | | |
| TAC | G | | N | | | V | | | N | Q | N | T | R |

[0101] In particular embodiments, napDNAbps useful in the methods of the invention include circular permutants, which are known in the art and described, for example, by Oakes et al., Cell 176, 254-267, 2019. An exemplary circular permutant follows where the bold sequence indicates sequence derived from Cas9, the italics sequence denotes a linker sequence, and the underlined sequence denotes a bipartite nuclear localization sequence,

[0102] CP5 (with MSP “NGC=Pam Variant with mutations Regular Cas9 likes NGG” PID=Protein Interacting Domain and “D10A” nickase):

(SEQ ID NO: 3)
EIGKATAKYFFYSNIMNFFKTEITLANGEIRKRPLIETNGETGEIVWDKGR
DFATVRKVLSMPQVNIVKKTEVQTGGFSKESILPKRNSDKLIARKKDWDPK
KYGGFMQPTVAYSVLVVAKVEKGKSKKLKSVKELLGITIMERSSFEKNPID
FLEAKGYKEVKKDLIIKLPKYSLFELENGRKRMLASAKFLQKGNELALPSK
YVNFLYLASHYEKLKGSPEDNEQKQLFVEQHKHYLDEIIEQISEFSKRVIL
ADANLDKVLSAYNKHRDKPIREQAENIIHLFTLTNLGAPRAFKYFDTTIAR
KEYRSTKEVLDATLIHQSITGLYETRIDLSQLGGDGGSGGSGGSGGSGGSG
GSGGMDKKYSIGLAIGTNSVGWAVITDEYKVPSKKFKVLGNTDRHSIKKNL
IGALLFDSGETAEATRLKRTARRRYTRRKNRICYLQEIFSNEMAKVDDSFF
HRLEESFLVEEDKKHERHPIFGNIVDEVAYHEKYPTIYHLRKKLVDSTDKA
DLRLIYLALAHMIKFRGHFLIEGDLNPDNSDVDKLFIQLVQTYNQLFEENP
INASGVDAKAILSARLSKSRRLENLIAQLPGEKKNGLFGNLIALSLGLTPN
FKSNFDLAEDAKLQLSKDTYDDDLDNLLAQIGDQYADLFLAAKNLSDAILL
SDILRVNTEITKAPLSASMIKRYDEHHQDLTLLKALVRQQLPEKYKEIFFD
QSIMGYAGYIDGGASQEEFYKFIKPILEKMDGTEELLVKLNREDLLRKQRT
FDNGSIPHQIHLGELHAILRRQEDFYPFLKDNREKIEKILTFRIPYYVGPL
ARGNSRFAWMTRKSEETITPWNFEEVVDKGASAQSFIERMTNFDKNLPNEK
VLPKHSLLYEYFTVYNELTKVKYVTEGMRKPAFLSGEQKKAIVDLLFKTNR
KVTVKQLKEDYFKKIECFDSVEISGVEDRFNASLGTYHDLLKIIKDKDFLD
NEENEDILEDIVLTLTLFEDREMIEERLKTYAHLFDDKVMKQLKRRRYTGW
GRLSRKLINGIRDKQSGKTILDFLKSDGFANRNFMQLIHDDSLTEYEDIQK
AQVSGQGDSLHEHIANLAGSPAIKKGILQTVKVVDELVKVMGRHKPENIVI
EMARENQTTQKGQKNSRERMKRIEEGIKELGSQILKEHPVENTQLQNEKLY
LYYLQNGRDMYVDQELDINRLSDYDVDHIVPQSFLKDDSIDNKVLTRSDKN
RGKSDNVPSEEVVKKMKNYWRQLLNAKLITQRKFDNLTKAERGGLSELDKA
GFIKRQLVETRQITKHVAQILDSRMNTKYDENDKLIREVKVITLKSKLVSD
FRKDFQFYKVREINNYHHAHDAYLNAVVGTALIKKYPKLESEFVYGDYKVY
DVRKMIAKSEQEGADKRTADGSEFESPKKKRKV*

[0103] Non-limiting examples of a polynucleotide programmable nucleotide binding domain which can be incorporated into a base editor include a CRISPR protein-derived domain, a restriction nuclease, a meganuclease, TAL nuclease (TALEN), and a zinc finger nuclease (ZFN).

[0104] In some embodiments, the nucleic acid programmable DNA binding protein (napDNAbp) of any of the fusion proteins provided herein may be a CasX or CasY protein. In some embodiments, the napDNAbp is a CasX protein. In some embodiments, the napDNAbp is a CasY protein. In some embodiments, the napDNAbp comprises an amino acid sequence that is at least 85%, at least 90%, at least 91%, at least 92%, at least 93%, at least 94%, at least 95%, at least 96%, at least 97%, at least 98%, at least 99%, or at ease 99.5% identical to a naturally-occurring CasX or CasY protein. In some embodiments, the napDNAbp is a naturally-occurring CasX or CasY protein. In some embodiments, the napDNAbp comprises an amino acid sequence that is at least 85%, at least 90%, at least 91%, at least 92%, at least 93%, at least 94%, at least 95%, at least 96%, at least 97%, at least 98%, at least 99%, or at ease 99.5% identical to any CasX or CasY protein described herein. It should be appreciated that Cas12b/C2c1, CasX and CasY from other bacterial species may also be used in accordance with the present disclosure.

Cas12b/C2c1 (uniprot.org/uniprot/T0D7A2#2)
sp|T0D7A2|C2C1_ALIAG CRISPR-associated endo-nuclease C2c1 OS =
Alicyclobacillus acido-terrestris (strain ATCC 49025/DSM 3922/CIP 106132/
NCIMB 13137/GD3B) GN =c2c1 PE = 1 SV = 1
(SEQ ID NO: 39)
MAVKSIKVKLRLDDMPEIRAGLWKLHKEVNAGVRYYTEWLSLLRQENLYRRSPNGDGEQECDKTAEECKA
ELLERLRARQVENGHRGPAGSDDELLQLARQLYELLVPQAIGAKGDAQQIARKFLSPLADKDAVGGLGIA
KAGNKPRWVRMREAGEPGWEEEKEKAETRKSADRTADVLRALADFGLKPLMRVYTDSEMSSVEWKPLRKG
QAVRTWDRDMFQQAIERMMSWESWNQRVGQEYAKLVEQKNRFEQKNFVGQEHLVHLVNQLQQDMKEASPG
LESKEQTAHYVTGRALRGSDKVFEKWGKLAPDAPFDLYDAEIKNVQRRNTRRFGSHDLFAKLAEPEYQAL
WREDASFLTRYAVYNSILRKLNHAKMFATFTLPDATAHPIWTRFDKLGGNLHQYTFLFNEFGERRHAIRF
HKLLKVENGVAREVDDVTVPISMSEQLDNLLPRDPNEPIALYFRDYGAEQHFTGEFGGAKIQCRRDQLAH
MHRRRGARDVYLNVSVRVQSQSEARGERRPPYAAVFRLVGDNHRAFVHFDKLSDYLAEHPDDGKLGSEGL
LSGLRVMSVDLGLRTSASISVFRVARKDELKPNSKGRVPFFFPIKGNDNLVAVHERSQLLKLPGETESKD
LRAIREERQRTLRQLRTQLAYLRLLVRCGSEDVGRRERSWAKLIEQPVDAANHMTPDWREAFENELQKLK
SLHGICSDKEWMDAVYESVRRVWRHMGKQVRDWRKDVRSGERPKIRGYAKDVVGGNSIEQIEYLERQYKF
LKSWSFFGKVSGQVIRAEKGSRFAITLREHIDHAKEDRLKKLADRIIMEALGYVYALDERGKGKWVAKYP
PCQLILLEELSEYQFNNDRPPSENNQLMQWSHRGVFQELINQAQVHDLLVGTMYAAFSSRFDARTGAPGI
RCRRVPARCTQEHNPEPFPWWLNKFVVEHTLDACPLRADDLIPTGEGEIFVSPFSAEEGDFHQIHADLNA
AQNLQQRLWSDFDISQIRLRCDWGEVDGELVLIPRLTGKRTADSYSNKVFYTNTGVTYYERERGKKRRKV
FAQEKLSEEEAELLVEADEAREKSVVLMRDPSGIINRGNWTRQKEFWSMVNQRIEGYLVKQIRSRVPLQ
DSACENTGDI
CasX (uniprot.org/uniprot/F0NN87; uniprot.org/uniprot/F0NH53)
>tr|F0NN87|F0NN87_SULIH CRISPR-associated Casx protein OS = Sulfolobus
islandicus (strain HVE10/4) GN = SiH_0402 PE = 4 SV = 1
(SEQ ID NO: 40)
MEVPLYNIFGDNYIIQVATEAENSTIYNNKVEIDDEELRNVLNLAYKIAKNNEDAAAERRGKAKKKKGEE
GETTTSNIILPLSGNDKNPWTETLKCYNFPTTVALSEVFKNFSQVKECEEVSAPSFVKPEFYEFGRSPGM
VERTRRVKLEVEPHYLIIAAAGWVLTRLGKAKVSEGDYVGVNVFTPTRGILYSLIQNVNGIVPGIKPETA
FGLWIARKVVSSVTNPNVSVVRIYTISDAVGQNPTTINGGFSIDLTKLLEKRYLLSERLEAIARNALSIS
SNMRERYIVLANYIYEYLTGSKRLEDLLYFANRDLIMNLNSDDGKVRDLKLISAYVNGELIRGEG
>tr|F0NH53|F0NH53_SULIR CRISPR associated protein, Casx OS = Sulfolobus
islandicus (strain REY15A) GN = SiRe_0771 PE = 4 SV = 1
(SEQ ID NO: 41)
MEVPLYNIFGDNYIIQVATEAENSTIYNNKVEIDDEELRNVLNLAYKIAKNNEDAAAERRGKAKKKKGEE
GETTTSNIILPLSGNDKNPWTETLKCYNFPTTVALSEVFKNFSQVKECEEVSAPSFVKPEFYKFGRSPGM
VERTRRVKLEVEPHYLIMAAAGWVLTRLGKAKVSEGDYVGVNVFTPTRGILYSLIQNVNGIVPGIKPETA
FGLWIARKVVSSVTNPNVSVVSIYTISDAVGQNPTTINGGFSIDLTKLLEKRDLLSERLEAIARNALSIS
SNMRERYIVLANYIYEYLTGSKRLEDLLYFANRDLIMNLNSDDGKVRDLKLISAYVNGELIRGEG
Deltaproteobacteria CasX
(SEQ ID NO: 42)
MEKRINKIRKKLSADNATKPVSRSGPMKTLLVRVMTDDLKKRLEKRRKKPEVMPQVISNNAANNLRMLLD
DYTKMKEAILQVYWQEFKDDHVGLMCKFAQPASKKIDQNKLKPEMDEKGNLTTAGFACSQCGQPLFVYKL
EQVSEKGKAYTNYFGRCNVAEHEKLILLAQLKPVKDSDEAVTYSLGKFGQRALDFYSIHVTKESTHPVKP
LAQIAGNRYASGPVGKALSDACMGTIASFLSKYQDIIIEHQKVVKGNQKRLESLRELAGKENLEYPSVTL
PPQPHTKEGVDAYNEVIARVRMWVNLNLWQKLKLSRDDAKPLLRLKGFPSFPVVERRENEVDWWNTINEV
KKLIDAKRDMGRVFWSGVTAEKRNTILEGYNYLPNENDHKKREGSLENPKKPAKRQFGDLLLYLEKKYAG
DWGKVFDEAWERIDKKIAGLTSHIEREEARNAEDAQSKAVLTDWLRAKASFVLERLKEMDEKEFYACEIQ
LQKWYGDLRGNPFAVEAENRVVDISGFSIGSDGHSIQYRNLLAWKYLENGKREFYLLMNYGKKGRIRFTD
GTDIKKSGKWQGLLYGGGKAKVIDLTFDPDDEQLIILPLAFGTRQGREFIWNDLLSLETGLIKLANGRVI
EKTIYNKKIGRDEPALFVALTFERREVVDPSNIKPVNLIGVARGENIPAVIALTDPEGCPLPEFKDSSGG
PTDILRIGEGYKEKQRAIQAAKEVEQRRAGGYSRKFASKSRNLADDMVRNSARDLFYHAVTHDAVLVFAN
LSRGFGRQGKRTFMTERQYTKMEDWLTAKLAYEGLTSKTYLSKTLAQYTSKTCSNCGFTITYADMDVMLV
RLKKTSDGWATTLNNKELKAEYQITYYNRYKRQTVEKELSAELDRLSEESGNNDISKWTKGRRDEALFLL
KKRFSHRPVQEQFVCLDCGHEVHAAEQAALNIARSWLFLNSNSTEFKSYKSGKQPFVGAWQAFYKRRLKE
VWKPNA
CasY (ncbi.nlm.nih.gov/protein/APG80656.1)
>APG80656.1 CRISPR-associated protein CasY [uncultured Parcubacteria group
bacterium]
(SEQ ID NO: 43)
MSKRHPRISGVKGYRLHAQRLEYTGKSGAMRTIKYPLYSSPSGGRTVPREIVSAINDDYVGLYGLSNFDD
LYNAEKRNEEKVYSVLDFWYDCVQYGAVFSYTAPGLLKNVAEVRGGSYELTKTLKGSHLYDELQIDKVIK
FLNKKEISRANGSLDKLKKDIIDCFKAEYRERHKDQCNKLADDIKNAKKDAGASLGERQKKLFRDFFGIS
EQSENDKPSFTNPLNLTCCLLPFDTVNNNRNRGEVLFNKLKEYAQKLDKNEGSLEMWEYIGIGNSGTAFS
NFLGEGFLGRLRENKITELKKAMMDITDAWRGQEQEEELEKRLRILAALTIKLREPKFDNHWGGYRSDIN
GKLSSWLQNYINQTVKIKEDLKGHKKDLKKAKEMINRFGESDTKEEAVVSSLLESIEKIVPDDSADDEKP
DIPAIAIYRRFLSDGRLTLNRFVQREDVQEALIKERLEAEKKKKPKKRKKKSDAEDEKETIDFKELFPHL
AKPLKLVPNFYGDSKRELYKKYKNAAIYTDALWKAVEKIYKSAFSSSLKNSFFDTDFDKDFFIKRLQKIF
SVYRRFNTDKWKPIVKNSFAPYCDIVSLAENEVLYKPKQSRSRKSAAIDKNRVRLPSTENIAKAGIALAR
ELSVAGFDWKDLLKKEEHEEYIDLIELHKTALALLLAVTETQLDISALDFVENGTVKDFMKTRDGNLVLE
GRFLEMFSQSIVFSELRGLAGLMSRKEFITRSAIQTMNGKQAELLYIPHEFQSAKITTPKEMSRAFLDLA
PAEFATSLEPESLSEKSLLKLKQMRYYPHYFGYELTRTGQGIDGGVAENALRLEKSPVKKREIKCKQYKT
LGRGQNKIVLYVRSSYYQTQFLEWFLHRPKNVQTDVAVSGSFLIDEKKVKTRWNYDALTVALEPVSGSER
VFVSQPFTIFPEKSAEEEGQRYLGIDIGEYGIAYTALEITGDSAKILDQNFISDPQLKTLREEVKGLKLD
QRRGTFAMPSTKIARIRESLVHSLRNRIHHLALKHKAKIVYELEVSRFEEGKQKIKKVYATLKKADVYSE
IDADKNLQTTVWGKLAVASEISASYTSQFCGACKKLWRAEMQVDETITTQELIGTVRVIKGGTLIDAIKD
FMRPPIFDENDTPFPKYRDFCDKHHISKKMRGNSCLFICPFCRANADADIQASQTIALLRYVKEEKKVED
YFERFRKLKNIKVLGQMKKI

[0105] The term “conservative amino acid substitution” or “conservative mutation” refers to the replacement of one amino acid by another amino acid with a common property. A functional way to define common properties between individual amino acids is to analyze the normalized frequencies of amino acid changes between corresponding proteins of homologous organisms (Schulz, G. E. and Schirmer, R. H., Principles of Protein Structure, Springer-Verlag, New York (1979)). According to such analyses, groups of amino acids can be defined where amino acids within a group exchange preferentially with each other, and therefore resemble each other most in their impact on the overall protein structure (Schulz, G. E. and Schirmer, R. H., supra). Non-limiting examples of conservative mutations include amino acid substitutions of amino acids, for example, lysine for arginine and vice versa such that a positive charge can be maintained; glutamic acid for aspartic acid and vice versa such that a negative charge can be maintained; serine for threonine such that a free —OH can be maintained; and glutamine for asparagine such that a free —NH₂ can be maintained.

[0106] The term “coding sequence” or “protein coding sequence” as used interchangeably herein refers to a segment of a polynucleotide that codes for a protein. The region or sequence is bounded nearer the 5′ end by a start codon and nearer the 3′ end with a stop codon. Coding sequences can also be referred to as open reading frames.

[0107] The term “deaminase” or “deaminase domain,” as used herein, refers to a protein or enzyme that catalyzes a deamination reaction. In some embodiments, the deaminase is an adenosine deaminase, which catalyzes the hydrolytic deamination of adenine to hypoxanthine.

[0108] In some embodiments, the deaminase is an adenosine deaminase, which catalyzes the hydrolytic deamination of adenosine or adenine (A) to inosine (I). In some embodiments, the deaminase or deaminase domain is an adenosine deaminase catalyzing the hydrolytic deamination of adenosine or deoxyadenosine to inosine or deoxyinosine, respectively. In some embodiments, the adenosine deaminase catalyzes the hydrolytic deamination of adenosine in deoxyribonucleic acid (DNA). The adenosine deaminases (e.g., engineered adenosine deaminases, evolved adenosine deaminases) provided herein can be from any organism, such as a bacterium. In some embodiments, the adenosine deaminase is from a bacterium, such as Escherichia coli, Staphylococcus aureus, Salmonella typhimurium, Shewanella putrefaciens, Haemophilus influenzae, or Caulobacter crescentus.

[0109] In some embodiments, the adenosine deaminase is a TadA deaminase. In some embodiments, the TadA deaminase is TadA variant. In some embodiments, the TadA variant is a TadA*8. In some embodiments, the deaminase or deaminase domain is a variant of a naturally occurring deaminase from an organism, such as a human, chimpanzee, gorilla, monkey, cow, dog, rat, or mouse. In some embodiments, the deaminase or deaminase domain does not occur in nature. For example, in some embodiments, the deaminase or deaminase domain is at least 50%, at least 55%, at least 60%, at least 65%, at least 70%, at least 75% at least 80%, at least 85%, at least 90%, at least 91%, at least 92%, at least 93%, at least 94%, at least 95%, at least 96%, at least 97%, at least 98%, at least 99%, at least 99.1%, at least 99.2%, at least 99.3%, at least 99.4%, at least 99.5%, at least 99.6%, at least 99.7%, at least 99.8%, or at least 99.9% identical to a naturally occurring deaminase. For example, deaminase domains are described in International PCT Application Nos. PCT/2017/045381 (WO 2018/027078) and PCT/US2016/058344 (WO 2017/070632), each of which is incorporated herein by reference for its entirety. Also, see Komor, A. C., et al., “Programmable editing of a target base in genomic DNA without double-stranded DNA cleavage” Nature 533, 420-424 (2016); Gaudelli, N. M., et al., “Programmable base editing of A•T to G•C in genomic DNA without DNA cleavage” Nature 551, 464-471 (2017); Komor, A. C., et al., “Improved base excision repair inhibition and bacteriophage Mu Gam protein yields C:G-to-T:A base editors with higher efficiency and product purity” Science Advances 3:eaao4774 (2017)), and Rees, H. A., et al., “Base editing: precision chemistry on the genome and transcriptome of living cells.” Nat Rev Genet. 2018 December; 19(12):770-788. doi: 10.1038/s41576-018-0059-1, the entire contents of which are hereby incorporated by reference.

[0110] “Detect” refers to identifying the presence, absence or amount of the analyte to be detected. In one embodiment, a sequence alteration in a polynucleotide or polypeptide is detected. In another embodiment, the presence of indels is detected.

[0111] By “detectable label” is meant a composition that when linked to a molecule of interest renders the latter detectable, via spectroscopic, photochemical, biochemical, immunochemical, or chemical means. For example, useful labels include radioactive isotopes, magnetic beads, metallic beads, colloidal particles, fluorescent dyes, electron-dense reagents, enzymes (for example, as commonly used in an ELISA), biotin, digoxigenin, or haptens.

[0112] By “disease” is meant any condition or disorder that damages or interferes with the normal function of a cell, tissue, or organ. In an embodiment, the disease is SCD. In an embodiment, the disease is ß-thallasemia.

[0113] The term “effective amount,” as used herein, refers to an amount of a biologically active agent that is sufficient to elicit a desired biological response. The effective amount of active compound(s) used to practice the present invention for therapeutic treatment of a disease varies depending upon the manner of administration, the age, body weight, and general health of the subject. Ultimately, the attending physician or veterinarian will decide the appropriate amount and dosage regimen. Such amount is referred to as an “effective” amount. In particular embodiments, an effective amount is the amount of a base editor system of the invention (e.g., a fusion protein comprising a programmable DNA binding protein, a nucleobase editor and gRNA) that is sufficient to alter a SCD mutation in a cell to achieve a therapeutic effect (e.g., to reduce or control SCD in a subject or a symptom or condition thereof). Such therapeutic effect need not be sufficient to alter a SCD in all cells of a tissue or organ, but only in about 1%, 5%, 10%, 25%, 50%, 75% or more of the cells present in a tissue or organ. In one embodiment, an effective amount is sufficient to ameliorate one or more symptom of SCD, such symptoms include anemia and ischemia.

[0114] By “fragment” is meant a portion of a polypeptide or nucleic acid molecule. This portion contains, at least about 10%, 20%, 30%, 40%, 50%, 60%, 70%, 80%, or 90% of the entire length of the reference nucleic acid molecule or polypeptide. A fragment may contain 10, 20, 30, 40, 50, 60, 70, 80, 90, or 100, 200, 300, 400, 500, 600, 700, 800, 900, or 1000 nucleotides or amino acids.

[0115] By “guide RNA” or “gRNA” is meant a polynucleotide which can be specific for a target sequence and can form a complex with a polynucleotide programmable nucleotide binding domain protein (e.g., Cas9 or Cpf1). In an embodiment, the guide polynucleotide is a guide RNA (gRNA). gRNAs can exist as a complex of two or more RNAs, or as a single RNA molecule. gRNAs that exist as a single RNA molecule may be referred to as single-guide RNAs (sgRNAs), though “gRNA” is used interchangeably to refer to guide RNAs that exist as either single molecules or as a complex of two or more molecules. Typically, gRNAs that exist as single RNA species comprise two domains: (1) a domain that shares homology to a target nucleic acid (e.g., and directs binding of a Cas9 complex to the target); and (2) a domain that binds a Cas9 protein. In some embodiments, domain (2) corresponds to a sequence known as a tracrRNA and comprises a stem-loop structure. For example, in some embodiments, domain (2) is identical or homologous to a tracrRNA as provided in Jinek et al., Science 337:816-821 (2012), the entire contents of which is incorporated herein by reference. Other examples of gRNAs (e.g., those including domain 2) can be found in U.S. Provisional Patent Application Ser. No. 61/874,682, filed Sep. 6, 2013, entitled “Switchable Cas9 Nucleases and Uses Thereof,” and U.S. Provisional Patent Application Ser. No. 61/874,746, filed Sep. 6, 2013, entitled “Delivery System For Functional Nucleases,” the entire contents of each are hereby incorporated by reference in their entirety. In some embodiments, a gRNA comprises two or more of domains (1) and (2), and may be referred to as an “extended gRNA.” An extended gRNA will bind two or more Cas9 proteins and bind a target nucleic acid at two or more distinct regions, as described herein. The gRNA comprises a nucleotide sequence that complements a target site, which mediates binding of the nuclease/RNA complex to said target site, providing the sequence specificity of the nuclease:RNA complex. As will be appreciated by those skilled in the art, RNA polynucleotide sequences, e.g., gRNA sequences, include the nucleobase uracil (U), a pyrimidine derivative, rather than the nucleobase thymine (T), which is included in DNA polynucleotide sequences. In RNA, uracil base-pairs with adenine and replaces thymine during DNA transcription.

[0116] “Hb G-Makassar” or “Makassar” refers to a human β-hemoglobin variant, the human Hemoglobin (Hb) of G-Makassar variant or mutation (HB Makassar variant), which is an asymptomatic, naturally-occurring variant (E6A) hemoglobin. Hb G-Makassar was first identified in Indonesia. (Mohamad, A. S. et al., 2018, Hematol. Rep., 10(3):7210 (doi:10.4081/hr.2018.7210). The Hb G-Makassar mobility is slower when subjected to electrophoresis. The Makassar ß-hemoglobin variant has its anatomical abnormality at the ß-6 or A3 location where the glutamyl residue typically is replaced by an alanyl residue. The substitution of single amino acid in the gene encoding the ß-globin subunit ß-6 glutamyl to valine will result as sickle cell disease. Routine procedures, such as isoelectric focusing, hemoglobin electrophoresis separation by cation-exchange High Performance Liquid Chromatography (HPLC) and cellulose acetate electrophoresis, have been unable to separate the Hb G-Makassar and HbS globin forms, as they were found to have identical properties when analyzed by these methods. Consequently, Hb G-Makassar and HbS have been incorrectly identified and mistaken for each other by those skilled in the art, thus leading to misdiagnosis of Sickle Cell Disease (SCD).

[0117] “Hybridization” means hydrogen bonding, which may be Watson-Crick, Hoogsteen or reversed Hoogsteen hydrogen bonding, between complementary nucleobases. For example, adenine and thymine are complementary nucleobases that pair through the formation of hydrogen bonds.

[0118] The term “inhibitor of base repair” or “IBR” refers to a protein that is capable in inhibiting the activity of a nucleic acid repair enzyme, for example a base excision repair (BER) enzyme. In some embodiments, the IBR is an inhibitor of inosine base excision repair. Exemplary inhibitors of base repair include inhibitors of APE1, Endo III, Endo IV, Endo V, Endo VIII, Fpg, hOGG1, hNEIL1, T7 Endol, T4PDG, UDG, hSMUG1, and hAAG. In some embodiments, the IBR is an inhibitor of Endo V or hAAG. In some embodiments, the IBR is a catalytically inactive EndoV or a catalytically inactive hAAG. In some embodiments, the base repair inhibitor is an inhibitor of Endo V or hAAG. In some embodiments, the base repair inhibitor is a catalytically inactive EndoV or a catalytically inactive hAAG.

[0119] In some embodiments, the base repair inhibitor is uracil glycosylase inhibitor (UGI). UGI refers to a protein that is capable of inhibiting a uracil-DNA glycosylase base-excision repair enzyme. In some embodiments, a UGI domain comprises a wild-type UGI or a fragment of a wild-type UGI. In some embodiments, the UGI proteins provided herein include fragments of UGI and proteins homologous to a UGI or a UGI fragment. In some embodiments, the base repair inhibitor is an inhibitor of inosine base excision repair. In some embodiments, the base repair inhibitor is a “catalytically inactive inosine specific nuclease” or “dead inosine specific nuclease. Without wishing to be bound by any particular theory, catalytically inactive inosine glycosylases (e.g., alkyl adenine glycosylase (AAG)) can bind inosine but cannot create an abasic site or remove the inosine, thereby sterically blocking the newly formed inosine moiety from DNA damage/repair mechanisms. In some embodiments, the catalytically inactive inosine specific nuclease can be capable of binding an inosine in a nucleic acid but does not cleave the nucleic acid. Non-limiting exemplary catalytically inactive inosine specific nucleases include catalytically inactive alkyl adenosine glycosylase (AAG nuclease), for example, from a human, and catalytically inactive endonuclease V (EndoV nuclease), for example, from E. coli. In some embodiments, the catalytically inactive AAG nuclease comprises an E125Q mutation or a corresponding mutation in another AAG nuclease.

[0120] By “increases” is meant a positive alteration of at least 10%, 25%, 50%, 75%, or 100%.

[0121] An “intein” is a fragment of a protein that is able to excise itself and join the remaining fragments (the exteins) with a peptide bond in a process known as protein splicing. Inteins are also referred to as “protein introns.” The process of an intein excising itself and joining the remaining portions of the protein is herein termed “protein splicing” or “intein-mediated protein splicing.” In some embodiments, an intein of a precursor protein (an intein containing protein prior to intein-mediated protein splicing) comes from two genes. Such intein is referred to herein as a split intein (e.g., split intein-N and split intein-C). For example, in cyanobacteria, DnaE, the catalytic subunit a of DNA polymerase III, is encoded by two separate genes, dnaE-n and dnaE-c. The intein encoded by the dnaE-n gene may be herein referred as “intein-N.” The intein encoded by the dnaE-c gene may be herein referred as “intein-C.”

[0122] Other intein systems may also be used. For example, a synthetic intein based on the dnaE intein, the Cfa-N (e.g., split intein-N) and Cfa-C (e.g., split intein-C) intein pair, has been described (e.g., in Stevens et al., J Am Chem Soc. 2016 Feb. 24; 138(7):2162-5, incorporated herein by reference). Non-limiting examples of intein pairs that may be used in accordance with the present disclosure include: Cfa DnaE intein, Ssp GyrB intein, Ssp DnaX intein, Ter DnaE3 intein, Ter ThyX intein, Rma DnaB intein and Cne Prp8 intein (e.g., as described in U.S. Pat. No. 8,394,604, incorporated herein by reference.

Exemplary nucleotide and amino acid sequences of inteins are provided.

### DnaE Intein-N DNA:

(SEQ ID NO: 44)
TGCCTGTCATACGAAACCGAGATACTGACAGTAGAATATGGCCTTCTGC
CAATCGGGAAGATTGTGGAGAAACGGATAGAATGCACAGTTTACTCTGT
CGATAACAATGGTAACATTTATACTCAGCCAGTTGCCCAGTGGCACGAC
CGGGGAGAGCAGGAAGTATTCGAATACTGTCTGGAGGATGGAAGTCTCA
TTAGGGCCACTAAGGACCACAAATTTATGACAGTCGATGGCCAGATGCT
GCCTATAGACGAAATCTTTGAGCGAGAGTTGGACCTCATGCGAGTTGAC
AACCTTCCTAAT

### DnaE Intein-N Protein:

(SEQ ID NO: 45)
CLSYETEILTVEYGLLPIGKIVEKRIECTVYSVDNNGNIYTQPVAQWHDR
GEQEVFEYCLEDGSLIRATKDHKFMTVDGQMLPIDEIFERELDLMRVDNL
PN

### DnaE Intein-C DNA:

(SEQ ID NO: 46)
ATGATCAAGATAGCTACAAGGAAGTATCTTGGCAAACAAAACGTTTATGA
TATTGGAGTCGAAAGAGATCACAACTTTGCTCTGAAGAACGGATTCATAG
CTTCTAAT
Intein-C:
(SEQ ID NO: 47)
MIKIATRKYLGKQNVYDIGVERDHNFALKNGFIASN

### Cfa-N DNA:

(SEQ ID NO: 48)
TGCCTGTCTTATGATACCGAGATACTTACCGTTGAATATGGCTTCTTGC
CTATTGGAAAGATTGTCGAAGAGAGAATTGAATGCACAGTATATACTGT
AGACAAGAATGGTTTCGTTTACACACAGCCCATTGCTCAATGGCACAAT
CGCGGCGAACAAGAAGTATTTGAGTACTGTCTCGAGGATGGAAGCATCA
TACGAGCAACTAAAGATCATAAATTCATGACCACTGACGGGCAGATGTT
GCCAATAGATGAGATATTCGAGCGGGGCTTGGATCTCAAACAAGTGGAT
GGATTGCCA

### Cfa-N Protein:

(SEQ ID NO: 49)
CLSYDTEILTVEYGFLPIGKIVEERIECTVYTVDKNGFVYTQPIAQWHNR
GEQEVFEYCLEDGSIIRATKDHKFMTTDGQMLPIDEIFERGLDLKQVDGL
P

### Cfa-C DNA:

(SEQ ID NO: 50)
ATGAAGAGGACTGCCGATGGATCAGAGTTTGAATCTCCCAAGAAGAAGAG
GAAAGTAAAGATAATATCTCGAAAAAGTCTTGGTACCCAAAATGTCTATG
ATATTGGAGTGGAGAAAGATCACAACTTCCTTCTCAAGAACGGTCTCGTA
GCCAGCAAC

### Cfa-C Protein:

(SEQ ID NO: 51)
MKRTADGSEFESPKKKRKVKIISRKSLGTQNVYDIGVEKDHNFLLKNGLV
ASN

[0130] Intein-N and intein-C may be fused to the N-terminal portion of the split Cas9 and the C-terminal portion of the split Cas9, respectively, for the joining of the N-terminal portion of the split Cas9 and the C-terminal portion of the split Cas9. For example, in some embodiments, an intein-N is fused to the C-terminus of the N-terminal portion of the split Cas9, i.e., to form a structure of N—[N-terminal portion of the split Cas9]-[intein-N]—C. In some embodiments, an intein-C is fused to the N-terminus of the C-terminal portion of the split Cas9, i.e., to form a structure of N-[intein-C]-[C-terminal portion of the split Cas9]-C. The mechanism of intein-mediated protein splicing for joining the proteins the inteins are fused to (e.g., split Cas9) is known in the art, e.g., as described in Shah et al., Chem Sci. 2014; 5(1):446-461, incorporated herein by reference. Methods for designing and using inteins are known in the art and described, for example by WO2014004336, WO2017132580, US20150344549, and US20180127780, each of which is incorporated herein by reference in their entirety.

[0131] The terms “isolated,” “purified,” or “biologically pure” refer to material that is free to varying degrees from components which normally accompany it as found in its native state. “Isolate” denotes a degree of separation from original source or surroundings. “Purify” denotes a degree of separation that is higher than isolation. A “purified” or “biologically pure” protein is sufficiently free of other materials such that any impurities do not materially affect the biological properties of the protein or cause other adverse consequences. That is, a nucleic acid or peptide of this invention is purified if it is substantially free of cellular material, viral material, or culture medium when produced by recombinant DNA techniques, or chemical precursors or other chemicals when chemically synthesized. Purity and homogeneity are typically determined using analytical chemistry techniques, for example, polyacrylamide gel electrophoresis or high-performance liquid chromatography. The term “purified” can denote that a nucleic acid or protein gives rise to essentially one band in an electrophoretic gel. For a protein that can be subjected to modifications, for example, phosphorylation or glycosylation, different modifications may give rise to different isolated proteins, which can be separately purified.

[0132] By “isolated polynucleotide” is meant a nucleic acid (e.g., a DNA) that is free of the genes which, in the naturally-occurring genome of the organism from which the nucleic acid molecule of the invention is derived, flank the gene. The term therefore includes, for example, a recombinant DNA that is incorporated into a vector; into an autonomously replicating plasmid or virus; or into the genomic DNA of a prokaryote or eukaryote; or that exists as a separate molecule (for example, a cDNA or a genomic or cDNA fragment produced by PCR or restriction endonuclease digestion) independent of other sequences. In addition, the term includes an RNA molecule that is transcribed from a DNA molecule, as well as a recombinant DNA that is part of a hybrid gene encoding additional polypeptide sequence.

[0133] By an “isolated polypeptide” is meant a polypeptide of the invention that has been separated from components that naturally accompany it. Typically, the polypeptide is isolated when it is at least 60%, by weight, free from the proteins and naturally-occurring organic molecules with which it is naturally associated. Preferably, the preparation is at least 75%, more preferably at least 90%, and most preferably at least 99%, by weight, a polypeptide of the invention. An isolated polypeptide of the invention may be obtained, for example, by extraction from a natural source, by expression of a recombinant nucleic acid encoding such a polypeptide; or by chemically synthesizing the protein. Purity can be measured by any appropriate method, for example, column chromatography, polyacrylamide gel electrophoresis, or by HPLC analysis.

[0134] The term “linker”, as used herein, can refer to a covalent linker (e.g., covalent bond), a non-covalent linker, a chemical group, or a molecule linking two molecules or moieties, e.g., two components of a protein complex or a ribonucleocomplex, or two domains of a fusion protein, such as, for example, a polynucleotide programmable DNA binding domain (e.g., dCas9) and a deaminase domain ((e.g., an adenosine deaminase, or an adenosine deaminase and a cytidine deaminase, e.g., as described in PCT/US19/44935). A linker can join different components of, or different portions of components of, a base editor system. For example, in some embodiments, a linker can join a guide polynucleotide binding domain of a polynucleotide programmable nucleotide binding domain and a catalytic domain of a deaminase. In some embodiments, a linker can join a CRISPR polypeptide and a deaminase. In some embodiments, a linker can join a Cas9 and a deaminase. In some embodiments, a linker can join a dCas9 and a deaminase. In some embodiments, a linker can join a nCas9 and a deaminase. In some embodiments, a linker can join a guide polynucleotide and a deaminase. In some embodiments, a linker can join a deaminating component and a polynucleotide programmable nucleotide binding component of a base editor system. In some embodiments, a linker can join a RNA-binding portion of a deaminating component and a polynucleotide programmable nucleotide binding component of a base editor system. In some embodiments, a linker can join a RNA-binding portion of a deaminating component and a RNA-binding portion of a polynucleotide programmable nucleotide binding component of a base editor system. A linker can be positioned between, or flanked by, two groups, molecules, or other moieties and connected to each one via a covalent bond or non-covalent interaction, thus connecting the two. In some embodiments, the linker can be an organic molecule, group, polymer, or chemical moiety. In some embodiments, the linker can be a polynucleotide. In some embodiments, the linker can be a DNA linker. In some embodiments, the linker can be a RNA linker. In some embodiments, a linker can comprise an aptamer capable of binding to a ligand. In some embodiments, the ligand may be carbohydrate, a peptide, a protein, or a nucleic acid. In some embodiments, the linker may comprise an aptamer may be derived from a riboswitch. The riboswitch from which the aptamer is derived may be selected from a theophylline riboswitch, a thiamine pyrophosphate (TPP) riboswitch, an adenosine cobalamin (AdoCbl) riboswitch, an S-adenosyl methionine (SAM) riboswitch, an SAH riboswitch, a flavin mononucleotide (FMN) riboswitch, a tetrahydrofolate riboswitch, a lysine riboswitch, a glycine riboswitch, a purine riboswitch, a GlmS riboswitch, or a pre-queosine1 (PreQ1) riboswitch. In some embodiments, a linker may comprise an aptamer bound to a polypeptide or a protein domain, such as a polypeptide ligand. In some embodiments, the polypeptide ligand may be a K Homology (KH) domain, a MS2 coat protein domain, a PP7 coat protein domain, a SfMu Com coat protein domain, a sterile alpha motif, a telomerase Ku binding motif and Ku protein, a telomerase Sm7 binding motif and Sm7 protein, or a RNA recognition motif. In some embodiments, the polypeptide ligand may be a portion of a base editor system component. For example, a nucleobase editing component may comprise a deaminase domain and a RNA recognition motif.

[0135] In some embodiments, the linker can be an amino acid or a plurality of amino acids (e.g., a peptide or protein). In some embodiments, the linker can be about 5-100 amino acids in length, for example, about 5, 6, 7, 8, 9, 10, 11, 12, 13, 14, 15, 16, 17, 18, 19, 20, 20-30, 30-40, 40-50, 50-60, 60-70, 70-80, 80-90, or 90-100 amino acids in length. In some embodiments, the linker can be about 100-150, 150-200, 200-250, 250-300, 300-350, 350-400, 400-450, or 450-500 amino acids in length. Longer or shorter linkers can be also contemplated.

[0136] In some embodiments, a linker joins a gRNA binding domain of an RNA-programmable nuclease, including a Cas9 nuclease domain, and the catalytic domain of a nucleic-acid editing protein (e.g., adenosine deaminase). In some embodiments, a linker joins a dCas9 and a nucleic-acid editing protein. For example, the linker is positioned between, or flanked by, two groups, molecules, or other moieties and connected to each one via a covalent bond, thus connecting the two. In some embodiments, the linker is an amino acid or a plurality of amino acids (e.g., a peptide or protein). In some embodiments, the linker is an organic molecule, group, polymer, or chemical moiety. In some embodiments, the linker is 5-200 amino acids in length, for example, 5, 6, 7, 8, 9, 10, 11, 12, 13, 14, 15, 16, 17, 18, 19, 20, 25, 35, 45, 50, 55, 60, 60, 65, 70, 70, 75, 80, 85, 90, 90, 95, 100, 101, 102, 103, 104, 105, 110, 120, 130, 140, 150, 160, 175, 180, 190, or 200 amino acids in length. Longer or shorter linkers are also contemplated.

[0137] In some embodiments, the domains of the nucleobase editor are fused via a linker that comprises the amino acid sequence of SGGSSGSETPGTSESATPESSGGS (SEQ ID NO: 52), SGGSSGGSSGSETPGTSESATPESSGGSSGGS (SEQ ID NO: 53), or GGSGGSPGSPAGSPTSTEEGTSESATPESGPGTSTEPSEGSAPGSPAGSPTSTEEGTSTE PSEGSAPGTSTEPSEGSAPGTSESATPESGPGSEPATSGGSGGS (SEQ ID NO: 54).

[0138] In some embodiments, domains of the nucleobase editor are fused via a linker comprising the amino acid sequence SGSETPGTSESATPES (SEQ ID NO: 55), which may also be referred to as the XTEN linker. In some embodiments, a linker comprises the amino acid sequence SGGS (SEQ ID NO: 56). In some embodiments, a linker comprises (SGGS)ₙ (SEQ ID NO: 57), (GGGS)ₙ (SEQ ID NO: 58), (GGGGS)ₙ (SEQ ID NO: 59), (G)ₙ (SEQ ID NO: 60), (EAAAK)ₙ (SEQ ID NO: 61), (GGS)ₙ (SEQ ID NO: 62), SGSETPGTSESATPES (SEQ ID NO: 55), or (XP)ₙ motif (SEQ ID NO: 63), or a combination of any of these, wherein n is independently an integer between 1 and 30, and wherein X is any amino acid. In some embodiments, n is 1, 2, 3, 4, 5, 6, 7, 8, 9, 10, 11, 12, 13, 14, or 15.

[0139] In some embodiments, the linker is 24 amino acids in length. In some embodiments, the linker comprises the amino acid sequence SGGSSGGSSGSETPGTSESATPES (SEQ ID NO: 64). In some embodiments, the linker is 40 amino acids in length. In some embodiments, the linker comprises the amino acid sequence

SGGSSGGSSGSETPGTSESATPESSGGSSGGSSGGSSGGS (SEQ ID NO: 65). In some embodiments, the linker is 64 amino acids in length. In some embodiments, the linker comprises the amino acid sequence
SGGSSGGSSGSETPGTSESATPESSGGSSGGSSGGSSGGSSGSETPGTSESATPESSGGS SGGS (SEQ ID NO: 66). In some embodiments, the linker is 92 amino acids in length. In some embodiments, the linker comprises the amino acid sequence

### PGSPAGSPTSTEEGTSESATPESGPGTSTEPSEGSAPGSPAGSPTSTEEGTSTEPSEGSAPG TSTEPSEGSAPGTSESATPESGPGSEPATS (SEQ ID NO: 67).

[0140] By “marker” is meant any protein or polynucleotide having an alteration in expression level or activity that is associated with a disease or disorder.

[0141] The term “mutation,” as used herein, refers to a substitution of a residue within a sequence, e.g., a nucleic acid or amino acid sequence, with another residue, or a deletion or insertion of one or more residues within a sequence. Mutations are typically described herein by identifying the original residue followed by the position of the residue within the sequence and by the identity of the newly substituted residue. Various methods for making the amino acid substitutions (mutations) provided herein are well known in the art, and are provided by, for example, Green and Sambrook, Molecular Cloning: A Laboratory Manual (4^{th} ed., Cold Spring Harbor Laboratory Press, Cold Spring Harbor, N.Y. (2012)). In some embodiments, the presently disclosed base editors can efficiently generate an “intended mutation,” such as a point mutation, in a nucleic acid (e.g., a nucleic acid within a genome of a subject) without generating a significant number of unintended mutations, such as unintended point mutations. In some embodiments, an intended mutation is a mutation that is generated by a specific base editor (e.g., an adenosine base editor) bound to a guide polynucleotide (e.g., gRNA), specifically designed to generate the intended mutation.

[0142] In general, mutations made or identified in a sequence (e.g., an amino acid sequence as described herein) are numbered in relation to a reference (or wild type) sequence, i.e., a sequence that does not contain the mutations. The skilled practitioner in the art would readily understand how to determine the position of mutations in amino acid and nucleic acid sequences relative to a reference sequence.

[0143] The term “non-conservative mutations” involve amino acid substitutions between different groups, for example, lysine for tryptophan, or phenylalanine for serine, etc. In this case, it is preferable for the non-conservative amino acid substitution to not interfere with, or inhibit the biological activity of, the functional variant. The non-conservative amino acid substitution can enhance the biological activity of the functional variant, such that the biological activity of the functional variant is increased as compared to the wild-type protein.

[0144] The term “nuclear localization sequence,” “nuclear localization signal,” or “NLS” refers to an amino acid sequence that promotes import of a protein into the cell nucleus. Nuclear localization sequences are known in the art and described, for example, in Plank et al., International PCT application, PCT/EP2000/011690, filed Nov. 23, 2000, published as WO/2001/038547 on May 31, 2001, the contents of which are incorporated herein by reference for their disclosure of exemplary nuclear localization sequences. In other embodiments, the NLS is an optimized NLS described, for example, by Koblan et al., Nature Biotech. 2018 doi:10.1038/nbt.4172. In some embodiments, an NLS comprises the amino acid sequence KRTADGSEFESPKKKRKV (SEQ ID NO: 68), KRPAATKKAGQAKKKK (SEQ ID NO: 69), KKTELQTTNAENKTKKL (SEQ ID NO: 70), KRGINDRNFWRGENGRKTR (SEQ ID NO: 71), RKSGKIAAIVVKRPRK (SEQ ID NO: 72), PKKKRKV (SEQ ID NO: 73), or MDSLLMNRRKFLYQFKNVRWAKGRRETYLC (SEQ ID NO: 74)

[0145] The terms “nucleic acid” and “nucleic acid molecule,” as used herein, refer to a compound comprising a nucleobase and an acidic moiety, e.g., a nucleoside, a nucleotide, or a polymer of nucleotides. Typically, polymeric nucleic acids, e.g., nucleic acid molecules comprising three or more nucleotides are linear molecules, in which adjacent nucleotides are linked to each other via a phosphodiester linkage. In some embodiments, “nucleic acid” refers to individual nucleic acid residues (e.g. nucleotides and/or nucleosides). In some embodiments, “nucleic acid” refers to an oligonucleotide chain comprising three or more individual nucleotide residues. As used herein, the terms “oligonucleotide” and “polynucleotide” can be used interchangeably to refer to a polymer of nucleotides (e.g., a string of at least three nucleotides). In some embodiments, “nucleic acid” encompasses RNA as well as single and/or double-stranded DNA. Nucleic acids may be naturally occurring, for example, in the context of a genome, a transcript, an mRNA, tRNA, rRNA, siRNA, snRNA, a plasmid, cosmid, chromosome, chromatid, or other naturally occurring nucleic acid molecule. On the other hand, a nucleic acid molecule may be a non-naturally occurring molecule, e.g., a recombinant DNA or RNA, an artificial chromosome, an engineered genome, or fragment thereof, or a synthetic DNA, RNA, DNA/RNA hybrid, or including non-naturally occurring nucleotides or nucleosides. Furthermore, the terms “nucleic acid,” “DNA,” “RNA,” and/or similar terms include nucleic acid analogs, e.g., analogs having other than a phosphodiester backbone. Nucleic acids can be purified from natural sources, produced using recombinant expression systems and optionally purified, chemically synthesized, etc. Where appropriate, e.g., in the case of chemically synthesized molecules, nucleic acids can comprise nucleoside analogs such as analogs having chemically modified bases or sugars, and backbone modifications. A nucleic acid sequence is presented in the 5′ to 3′ direction unless otherwise indicated. In some embodiments, a nucleic acid is or comprises natural nucleosides (e.g. adenosine, thymidine, guanosine, cytidine, uridine, deoxyadenosine, deoxythymidine, deoxyguanosine, and deoxycytidine); nucleoside analogs (e.g., 2-aminoadenosine, 2-thiothymidine, inosine, pyrrolo-pyrimidine, 3-methyl adenosine, 5-methylcytidine, 2-aminoadenosine, C5-bromouridine, C5-fluorouridine, C5-iodouridine, C5-propynyl-uridine, C5-propynyl-cytidine, C5-methylcytidine, 2-aminoadenosine, 7-deazaadenosine, 7-deazaguanosine, 8-oxoadenosine, 8-oxoguanosine, O(6)-methylguanine, and 2-thiocytidine); chemically modified bases; biologically modified bases (e.g., methylated bases); intercalated bases; modified sugars (2′—e.g., fluororibose, ribose, 2′-deoxyribose, arabinose, and hexose); and/or modified phosphate groups (e.g., phosphorothioates and 5′-N-phosphoramidite linkages).

[0146] The term “nucleic acid programmable DNA binding protein” or “napDNAbp” may be used interchangeably with “polynucleotide programmable nucleotide binding domain” to refer to a protein that associates with a nucleic acid (e.g., DNA or RNA), such as a guide nucleic acid or guide polynucleotide (e.g., gRNA), that guides the napDNAbp to a specific nucleic acid sequence. In some embodiments, the polynucleotide programmable nucleotide binding domain is a polynucleotide programmable DNA binding domain. In some embodiments, the polynucleotide programmable nucleotide binding domain is a polynucleotide programmable RNA binding domain. In some embodiments, the polynucleotide programmable nucleotide binding domain is a Cas9 protein. A Cas9 protein can associate with a guide RNA that guides the Cas9 protein to a specific DNA sequence that is complementary to the guide RNA. In some embodiments, the napDNAbp is a Cas9 domain, for example a nuclease active Cas9, a Cas9 nickase (nCas9), or a nuclease inactive Cas9 (dCas9). Non-limiting examples of nucleic acid programmable DNA binding proteins include, Cas9 (e.g., dCas9 and nCas9), Cas12a/Cpf1, Cas12b/C2c1, Cas12c/C2c3, Cas12d/CasY, Cas12e/CasX, Cas12g, Cas12h, and Cas12i. Non-limiting examples of Cas enzymes include Cas1, Cas1B, Cas2, Cas3, Cas4, Cas5, Cas5d, Cas5t, Cas5h, Cas5a, Cas6, Cas7, Cas8, Cas8a, Cas8b, Cas8c, Cas9 (also known as Csn1 or Csx12), Cas10, Cas10d, Cas12a/Cpf1, Cas12b/C2c1, Cas12c/C2c3, Cas12d/CasY, Cas12e/CasX, Cas12g, Cas12h, Cas12i, Csy1, Csy2, Csy3, Csy4, Cse1, Cse2, Cse3, Cse4, Cse5e, Csc1, Csc2, Csa5, Csn1, Csn2, Csm1, Csm2, Csm3, Csm4, Csm5, Csm6, Cmr1, Cmr3, Cmr4, Cmr5, Cmr6, Csb1, Csb2, Csb3, Csx17, Csx14, Csx10, Csx16, CsaX, Csx3, Csx1, Csx1S, Csx11, Csf1, Csf2, CsO, Csf4, Csd1, Csd2, Cst1, Cst2, Csh1, Csh2, Csa1, Csa2, Csa3, Csa4, Csa5, Type II Cas effector proteins, Type V Cas effector proteins, Type VI Cas effector proteins, CARF, DinG, homologues thereof, or modified or engineered versions thereof. Other nucleic acid programmable DNA binding proteins are also within the scope of this disclosure, although they may not be specifically listed in this disclosure. See, e.g., Makarova et al. “Classification and Nomenclature of CRISPR-Cas Systems: Where from Here?” CRISPR J. 2018 October; 1:325-336. doi: 10.1089/crispr.2018.0033; Yan et al., “Functionally diverse type V CRISPR-Cas systems” Science. 2019 Jan. 4; 363(6422):88-91. doi: 10.1126/science.aav7271, the entire contents of each are hereby incorporated by reference.

[0147] The term “nucleobase,” “nitrogenous base,” or “base,” used interchangeably herein, refers to a nitrogen-containing biological compound that forms a nucleoside, which in turn is a component of a nucleotide. The ability of nucleobases to form base pairs and to stack one upon another leads directly to long-chain helical structures such as ribonucleic acid (RNA) and deoxyribonucleic acid (DNA). Five nucleobases—adenine (A), cytosine (C), guanine (G), thymine (T), and uracil (U)—are called primary or canonical. Adenine and guanine are derived from purine, and cytosine, uracil, and thymine are derived from pyrimidine. DNA and RNA can also contain other (non-primary) bases that are modified. Non-limiting exemplary modified nucleobases can include hypoxanthine, xanthine, 7-methylguanine, 5,6-dihydrouracil, 5-methylcytosine (m5C), and 5-hydromethylcytosine. Hypoxanthine and xanthine can be created through mutagen presence, both of them through deamination (replacement of the amine group with a carbonyl group). Hypoxanthine can be modified from adenine. Xanthine can be modified from guanine. Uracil can result from deamination of cytosine. A “nucleoside” consists of a nucleobase and a five carbon sugar (either ribose or deoxyribose). Examples of a nucleoside include adenosine, guanosine, uridine, cytidine, 5-methyluridine (m5U), deoxyadenosine, deoxyguanosine, thymidine, deoxyuridine, and deoxycytidine. Examples of a nucleoside with a modified nucleobase includes inosine (I), xanthosine (X), 7-methylguanosine (m7G), dihydrouridine (D), 5-methylcytidine (m5C), and pseudouridine (Ψ). A “nucleotide” consists of a nucleobase, a five carbon sugar (either ribose or deoxyribose), and at least one phosphate group.

[0148] The terms “nucleobase editing domain” or “nucleobase editing protein,” as used herein, refers to a protein or enzyme that can catalyze a nucleobase modification in RNA or DNA, such as cytosine (or cytidine) to uracil (or uridine) or thymine (or thymidine), and adenine (or adenosine) to hypoxanthine (or inosine) deaminations, as well as non-templated nucleotide additions and insertions. In some embodiments, the nucleobase editing domain is a deaminase domain (e.g., an adenine deaminase or an adenosine deaminase; or a cytidine deaminase or a cytosine deaminase). In some embodiments, the nucleobase editing domain is more than one deaminase domain (e.g., an adenine deaminase, or an adenosine deaminase and a cytidine or a cytosine deaminase, e.g., as described in PCT/US19/44935). In some embodiments, the nucleobase editing domain can be a naturally occurring nucleobase editing domain. In some embodiments, the nucleobase editing domain can be an engineered or evolved nucleobase editing domain from the naturally occurring nucleobase editing domain. The nucleobase editing domain can be from any organism, such as a bacterium, human, chimpanzee, gorilla, monkey, cow, dog, rat, or mouse.

[0149] As used herein, “obtaining” as in “obtaining an agent” includes synthesizing, purchasing, generating, preparing, or otherwise acquiring the agent.

[0150] A “patient” or “subject” as used herein refers to a mammalian subject or individual diagnosed with, having, at risk of having or developing, susceptible to, or suspected of having or developing a disease or a disorder. In some embodiments, the term “patient” refers to a mammalian subject with a higher than average likelihood of developing a disease or a disorder. Exemplary patients can be humans, non-human primates, cats, dogs, pigs, cattle, cats, horses, camels, llamas, goats, sheep, rodents (e.g., mice, rabbits, rats, or guinea pigs) and other mammals that can benefit from the therapies disclosed herein. Exemplary human patients can be male and/or female.

[0151] “Patient in need thereof” or “subject in need thereof” is referred to herein as a patient diagnosed with, at risk or having, predetermined to have, or suspected of having a disease or disorder.

[0152] The terms “pathogenic mutation,” “pathogenic variant,” “disease casing mutation,” “disease causing variant,” “deleterious mutation,” or “predisposing mutation” refers to a genetic alteration or mutation that increases an individual's susceptibility or predisposition to a certain disease or disorder. In some embodiments, the pathogenic mutation comprises at least one wild-type amino acid substituted by at least one pathogenic amino acid in a protein encoded by a gene.

[0153] The terms “protein,” “peptide,” “polypeptide,” and their grammatical equivalents are used interchangeably herein, and refer to a polymer of amino acid residues linked together by peptide (amide) bonds. The terms refer to a protein, peptide, or polypeptide of any size, structure, or function. Typically, a protein, peptide, or polypeptide will be at least three amino acids long. A protein, peptide, or polypeptide can refer to an individual protein or a collection of proteins. One or more of the amino acids in a protein, peptide, or polypeptide can be modified, for example, by the addition of a chemical entity such as a carbohydrate group, a hydroxyl group, a phosphate group, a farnesyl group, an isofarnesyl group, a fatty acid group, a linker for conjugation, functionalization, or other modifications, etc. A protein, peptide, or polypeptide can also be a single molecule or can be a multi-molecular complex. A protein, peptide, or polypeptide can be just a fragment of a naturally occurring protein or peptide. A protein, peptide, or polypeptide can be naturally occurring, recombinant, or synthetic, or any combination thereof. The term “fusion protein” as used herein refers to a hybrid polypeptide which comprises protein domains from at least two different proteins. One protein can be located at the amino-terminal (N-terminal) portion of the fusion protein or at the carboxy-terminal (C-terminal) protein thus forming an amino-terminal fusion protein or a carboxy-terminal fusion protein, respectively. A protein can comprise different domains, for example, a nucleic acid binding domain (e.g., the gRNA binding domain of Cas9 that directs the binding of the protein to a target site) and a nucleic acid cleavage domain, or a catalytic domain of a nucleic acid editing protein. In some embodiments, a protein comprises a proteinaceous part, e.g., an amino acid sequence constituting a nucleic acid binding domain, and an organic compound, e.g., a compound that can act as a nucleic acid cleavage agent. In some embodiments, a protein is in a complex with, or is in association with, a nucleic acid, e.g., RNA or DNA. Any of the proteins provided herein can be produced by any method known in the art. For example, the proteins provided herein can be produced via recombinant protein expression and purification, which is especially suited for fusion proteins comprising a peptide linker. Methods for recombinant protein expression and purification are well known, and include those described by Green and Sambrook, Molecular Cloning: A Laboratory Manual (4th ed., Cold Spring Harbor Laboratory Press, Cold Spring Harbor, N.Y. (2012)), the entire contents of which are incorporated herein by reference.

[0154] Polypeptides and proteins disclosed herein (including functional portions and functional variants thereof) can comprise synthetic amino acids in place of one or more naturally-occurring amino acids. Such synthetic amino acids are known in the art, and include, for example, aminocyclohexane carboxylic acid, norleucine, α-amino n-decanoic acid, homoserine, S-acetylaminomethyl-cysteine, trans-3- and trans-4-hydroxyproline, 4-aminophenylalanine, 4-nitrophenylalanine, 4-chlorophenylalanine, 4-carboxyphenylalanine, β-phenylserine β-hydroxyphenylalanine, phenylglycine, α-naphthylalanine, cyclohexylalanine, cyclohexylglycine, indoline-2-carboxylic acid, 1,2,3,4-tetrahydroisoquinoline-3-carboxylic acid, aminomalonic acid, aminomalonic acid monoamide, N′-benzyl-N′-methyl-lysine, N′,N′-dibenzyl-lysine, 6-hydroxylysine, ornithine, α-aminocyclopentane carboxylic acid, α-aminocyclohexane carboxylic acid, α-aminocycloheptane carboxylic acid, α-(2-amino-2-norbornane)-carboxylic acid, α,γ-diaminobutyric acid, α,β-diaminopropionic acid, homophenylalanine, and α-tert-butylglycine. The polypeptides and proteins can be associated with post-translational modifications of one or more amino acids of the polypeptide constructs. Non-limiting examples of post-translational modifications include phosphorylation, acylation including acetylation and formylation, glycosylation (including N-linked and O-linked), amidation, hydroxylation, alkylation including methylation and ethylation, ubiquitylation, addition of pyrrolidone carboxylic acid, formation of disulfide bridges, sulfation, myristoylation, palmitoylation, isoprenylation, farnesylation, geranylation, glypiation, lipoylation and iodination.

[0155] The term “recombinant” as used herein in the context of proteins or nucleic acids refers to proteins or nucleic acids that do not occur in nature, but are the product of human engineering. For example, in some embodiments, a recombinant protein or nucleic acid molecule comprises an amino acid or nucleotide sequence that comprises at least one, at least two, at least three, at least four, at least five, at least six, or at least seven mutations as compared to any naturally occurring sequence.

[0156] By “reduces” is meant a negative alteration of at least 10%, 25%, 50%, 75%, or 100%.

[0157] By “reference” is meant a standard or control condition. In one embodiment, the reference is a wild-type or healthy cell. In other embodiments and without limitation, a reference is an untreated cell that is not subjected to a test condition, or is subjected to placebo or normal saline, medium, buffer, and/or a control vector that does not harbor a polynucleotide of interest.

[0158] A “reference sequence” is a defined sequence used as a basis for sequence comparison. A reference sequence may be a subset of or the entirety of a specified sequence; for example, a segment of a full-length cDNA or gene sequence, or the complete cDNA or gene sequence. For polypeptides, the length of the reference polypeptide sequence will generally be at least about 16 amino acids, at least about 20 amino acids, more at least about 25 amino acids, and even more preferably about 35 amino acids, about 50 amino acids, or about 100 amino acids. For nucleic acids, the length of the reference nucleic acid sequence will generally be at least about 50 nucleotides, at least about 60 nucleotides, at least about 75 nucleotides, and about 100 nucleotides or about 300 nucleotides or any integer thereabout or therebetween. In some embodiments, a reference sequence is a wild-type sequence of a protein of interest. In other embodiments, a reference sequence is a polynucleotide sequence encoding a wild-type protein.

[0159] The term “RNA-programmable nuclease,” and “RNA-guided nuclease” are used with (e.g., binds or associates with) one or more RNA(s) that is not a target for cleavage. In some embodiments, an RNA-programmable nuclease, when in a complex with an RNA, may be referred to as a nuclease:RNA complex. Typically, the bound RNA(s) is referred to as a guide RNA (gRNA). gRNAs can exist as a complex of two or more RNAs, or as a single RNA molecule. gRNAs that exist as a single RNA molecule may be referred to as single-guide RNAs (sgRNAs), though “gRNA” is used interchangeably to refer to guide RNAs that exist as either single molecules or as a complex of two or more molecules. Typically, gRNAs that exist as single RNA species comprise two domains: (1) a domain that shares homology to a target nucleic acid (e.g., and directs binding of a Cas9 complex to the target); and (2) a domain that binds a Cas9 protein. In some embodiments, domain (2) corresponds to a sequence known as a tracrRNA, and comprises a stem-loop structure. For example, in some embodiments, domain (2) is identical or homologous to a tracrRNA as provided in Jinek et ah, Science 337:816-821 (2012), the entire contents of which is incorporated herein by reference. Other examples of gRNAs (e.g., those including domain 2) can be found in U.S. Provisional Patent Application Ser. No. 61/874,682, filed Sep. 6, 2013, entitled “Switchable Cas9 Nucleases and Uses Thereof,” and U.S. Provisional Patent Application Ser. No. 61/874,746, filed Sep. 6, 2013, entitled “Delivery System For Functional Nucleases,” the entire contents of each are hereby incorporated by reference in their entirety. In some embodiments, a gRNA comprises two or more of domains (1) and (2), and may be referred to as an “extended gRNA.” For example, an extended gRNA will, e.g., bind two or more Cas9 proteins and bind a target nucleic acid at two or more distinct regions, as described herein. The gRNA comprises a nucleotide sequence that complements a target site, which mediates binding of the nuclease/RNA complex to said target site, providing the sequence specificity of the nuclease:RNA complex.

[0160] In some embodiments, the RNA-programmable nuclease is the (CRISPR-associated system) Cas9 endonuclease, for example, Cas9 (Csn1) from Streptococcus pyogenes (see, e.g., “Complete genome sequence of an M1 strain of Streptococcus pyogenes.” Ferretti J. J., McShan W. M., Ajdic D. J., Savic D. J., Savic G., Lyon K., Primeaux C, Sezate S., Suvorov A. N., Kenton S., Lai H. S., Lin S. P., Qian Y., Jia H. G., Najar F. Z., Ren Q., Zhu H., Song L., White J., Yuan X., Clifton S. W., Roe B. A., McLaughlin R. E., Proc. Natl. Acad. Sci. U.S.A. 98:4658-4663 (2001); “CRISPR RNA maturation by trans-encoded small RNA and host factor RNase III.” Deltcheva E., Chylinski K., Sharma C M., Gonzales K., Chao Y., Pirzada Z. A., Eckert M. R., Vogel J., Charpentier E., Nature 471:602-607 (2011).

[0161] Because RNA-programmable nucleases (e.g., Cas9) use RNA:DNA hybridization to target DNA cleavage sites, these proteins are able to be targeted, in principle, to any sequence specified by the guide RNA. Methods of using RNA-programmable nucleases, such as Cas9, for site-specific cleavage (e.g., to modify a genome) are known in the art (see e.g., Cong, L. et al., Multiplex genome engineering using CRISPR/Cas systems. Science 339, 819-823 (2013); Mali, P. et ah, RNA-guided human genome engineering via Cas9. Science 339, 823-826 (2013); Hwang, W. Y. et al., Efficient genome editing in zebrafish using a CRISPR-Cas system. Nature biotechnology 31, 227-229 (2013); Jinek, M. et ah, RNA-programmed genome editing in human cells. eLife 2, e00471 (2013); Dicarlo, J. E. et al., Genome engineering in Saccharomyces cerevisiae using CRISPR-Cas systems. Nucleic acids research (2013); Jiang, W. et ah RNA-guided editing of bacterial genomes using CRISPR-Cas systems. Nature biotechnology 31, 233-239 (2013); the entire contents of each of which are incorporated herein by reference).

[0162] The term “single nucleotide polymorphism (SNP)” is a variation in a single nucleotide that occurs at a specific position in the genome, where each variation is present to some appreciable degree within a population (e.g., >1%). For example, at a specific base position in the human genome, the C nucleotide can appear in most individuals, but in a minority of individuals, the position is occupied by an A. This means that there is a SNP at this specific position, and the two possible nucleotide variations, C or A, are said to be alleles for this position. SNPs underlie differences in susceptibility to disease. The severity of illness and the way our body responds to treatments are also manifestations of genetic variations. SNPs can fall within coding regions of genes, non-coding regions of genes, or in the intergenic regions (regions between genes). In some embodiments, SNPs within a coding sequence do not necessarily change the amino acid sequence of the protein that is produced, due to degeneracy of the genetic code. SNPs in the coding region are of two types: synonymous and nonsynonymous SNPs. Synonymous SNPs do not affect the protein sequence, while nonsynonymous SNPs change the amino acid sequence of protein. The nonsynonymous SNPs are of two types: missense and nonsense. SNPs that are not in protein-coding regions can still affect gene splicing, transcription factor binding, messenger RNA degradation, or the sequence of noncoding RNA. Gene expression affected by this type of SNP is referred to as an eSNP (expression SNP) and can be upstream or downstream from the gene. A single nucleotide variant (SNV) is a variation in a single nucleotide without any limitations of frequency and can arise in somatic cells. A somatic single nucleotide variation can also be called a single-nucleotide alteration.

[0163] By “specifically binds” is meant a nucleic acid molecule, polypeptide, or complex thereof (e.g., a nucleic acid programmable DNA binding domain and guide nucleic acid), compound, or molecule that recognizes and binds a polypeptide and/or nucleic acid molecule of the invention, but which does not substantially recognize and bind other molecules in a sample, for example, a biological sample.

[0164] Nucleic acid molecules useful in the methods of the invention include any nucleic acid molecule that encodes a polypeptide of the invention or a fragment thereof. Such nucleic acid molecules need not be 100% identical with an endogenous nucleic acid sequence, but will typically exhibit substantial identity. Polynucleotides having “substantial identity” to an endogenous sequence are typically capable of hybridizing with at least one strand of a double-stranded nucleic acid molecule. Nucleic acid molecules useful in the methods of the invention include any nucleic acid molecule that encodes a polypeptide of the invention or a fragment thereof. Such nucleic acid molecules need not be 100% identical with an endogenous nucleic acid sequence, but will typically exhibit substantial identity. Polynucleotides having “substantial identity” to an endogenous sequence are typically capable of hybridizing with at least one strand of a double-stranded nucleic acid molecule. By “hybridize” is meant pair to form a double-stranded molecule between complementary polynucleotide sequences (e.g., a gene described herein), or portions thereof, under various conditions of stringency. (See, e.g., Wahl, G. M. and S. L. Berger (1987) Methods Enzymol. 152:399; Kimmel, A. R. (1987) Methods Enzymol. 152:507).

[0165] For example, stringent salt concentration will ordinarily be less than about 750 mM NaCl and 75 mM trisodium citrate, preferably less than about 500 mM NaCl and 50 mM trisodium citrate, and more preferably less than about 250 mM NaCl and 25 mM trisodium citrate. Low stringency hybridization can be obtained in the absence of organic solvent, e.g., formamide, while high stringency hybridization can be obtained in the presence of at least about 35% formamide, and more preferably at least about 50% formamide. Stringent temperature conditions will ordinarily include temperatures of at least about 30° C., more preferably of at least about 37° C., and most preferably of at least about 42° C. Varying additional parameters, such as hybridization time, the concentration of detergent, e.g., sodium dodecyl sulfate (SDS), and the inclusion or exclusion of carrier DNA, are well known to those skilled in the art. Various levels of stringency are accomplished by combining these various conditions as needed. In a one: embodiment, hybridization will occur at 30° C. in 750 mM NaCl, 75 mM trisodium citrate, and 1% SDS. In another embodiment, hybridization will occur at 37° C. in 500 mM NaCl, 50 mM trisodium citrate, 1% SDS, 35% formamide, and 100 μg/ml denatured salmon sperm DNA (ssDNA). In another embodiment, hybridization will occur at 42° C. in 250 mM NaCl, 25 mM trisodium citrate, 1% SDS, 50% formamide, and 200 μg/ml ssDNA. Useful variations on these conditions will be readily apparent to those skilled in the art.

[0166] For most applications, washing steps that follow hybridization will also vary in stringency. Wash stringency conditions can be defined by salt concentration and by temperature. As above, wash stringency can be increased by decreasing salt concentration or by increasing temperature. For example, stringent salt concentration for the wash steps will preferably be less than about 30 mM NaCl and 3 mM trisodium citrate, and most preferably less than about 15 mM NaCl and 1.5 mM trisodium citrate. Stringent temperature conditions for the wash steps will ordinarily include a temperature of at least about 25° C., more preferably of at least about 42° C., and even more preferably of at least about 68° C. In an embodiment, wash steps will occur at 25° C. in 30 mM NaCl, 3 mM trisodium citrate, and 0.1% SDS. In a more preferred embodiment, wash steps will occur at 42 C in 15 mM NaCl, 1.5 mM trisodium citrate, and 0.1% SDS. In a more preferred embodiment, wash steps will occur at 68° C. in 15 mM NaCl, 1.5 mM trisodium citrate, and 0.1% SDS. Additional variations on these conditions will be readily apparent to those skilled in the art. Hybridization techniques are well known to those skilled in the art and are described, for example, in Benton and Davis (Science 196:180, 1977); Grunstein and Hogness (Proc. Natl. Acad. Sci., USA 72:3961, 1975); Ausubel et al. (Current Protocols in Molecular Biology, Wiley Interscience, New York, 2001); Berger and Kimmel (Guide to Molecular Cloning Techniques, 1987, Academic Press, New York); and Sambrook et al., Molecular Cloning: A Laboratory Manual, Cold Spring Harbor Laboratory Press, New York.

[0167] By “split” is meant divided into two or more fragments.

[0168] A “split Cas9 protein” or “split Cas9” refers to a Cas9 protein that is provided as an N-terminal fragment and a C-terminal fragment encoded by two separate nucleotide sequences. The polypeptides corresponding to the N-terminal portion and the C-terminal portion of the Cas9 protein may be spliced to form a “reconstituted” Cas9 protein. In particular embodiments, the Cas9 protein is divided into two fragments within a disordered region of the protein, e.g., as described in Nishimasu et al., Cell, Volume 156, Issue 5, pp. 935-949, 2014, or as described in Jiang et al. (2016) Science 351: 867-871. PDB file: 5F9R, each of which is incorporated herein by reference. In some embodiments, the protein is divided into two fragments at any C, T, A, or S within a region of SpCas9 between about amino acids A292-G364, F445-K483, or E565-T637, or at corresponding positions in any other Cas9, Cas9 variant (e.g., nCas9, dCas9), or other napDNAbp. In some embodiments, protein is divided into two fragments at SpCas9 T310, T313, A456, 5469, or C574. In some embodiments, the process of dividing the protein into two fragments is referred to as “splitting” the protein.

[0169] In other embodiments, the N-terminal portion of the Cas9 protein comprises amino acids 1-573 or 1-637 of S. pyogenes Cas9 wild-type (SpCas9) (NCBI Reference Sequence: NC_002737.2, Uniprot Reference Sequence: Q99ZW2), or a corresponding position/mutation thereof, and the C-terminal portion of the Cas9 protein comprises a portion of amino acids 574-1368 or 638-1368 of SpCas9 wild-type.

[0170] The C-terminal portion of the split Cas9 can be joined with the N-terminal portion of the split Cas9 to form a complete Cas9 protein. In some embodiments, the C-terminal portion of the Cas9 protein starts from where the N-terminal portion of the Cas9 protein ends. As such, in some embodiments, the C-terminal portion of the split Cas9 comprises a portion of amino acids (551-651)-1368 of spCas9. “(551-651)-1368” means starting at an amino acid between amino acids 551-651 (inclusive) and ending at amino acid 1368. For example, the C-terminal portion of the split Cas9 may comprise a portion of any one of amino acid 551-1368, 552-1368, 553-1368, 554-1368, 555-1368, 556-1368, 557-1368, 558-1368, 559-1368, 560-1368, 561-1368, 562-1368, 563-1368, 564-1368, 565-1368, 566-1368, 567-1368, 568-1368, 569-1368, 570-1368, 571-1368, 572-1368, 573-1368, 574-1368, 575-1368, 576-1368, 577-1368, 578-1368, 579-1368, 580-1368, 581-1368, 582-1368, 583-1368, 584-1368, 585-1368, 586-1368, 587-1368, 588-1368, 589-1368, 590-1368, 591-1368, 592-1368, 593-1368, 594-1368, 595-1368, 596-1368, 597-1368, 598-1368, 599-1368, 600-1368, 601-1368, 602-1368, 603-1368, 604-1368, 605-1368, 606-1368, 607-1368, 608-1368, 609-1368, 610-1368, 611-1368, 612-1368, 613-1368, 614-1368, 615-1368, 616-1368, 617-1368, 618-1368, 619-1368, 620-1368, 621-1368, 622-1368, 623-1368, 624-1368, 625-1368, 626-1368, 627-1368, 628-1368, 629-1368, 630-1368, 631-1368, 632-1368, 633-1368, 634-1368, 635-1368, 636-1368, 637-1368, 638-1368, 639-1368, 640-1368, 641-1368, 642-1368, 643-1368, 644-1368, 645-1368, 646-1368, 647-1368, 648-1368, 649-1368, 650-1368, or 651-1368 of spCas9. In some embodiments, the C-terminal portion of the split Cas9 protein comprises a portion of amino acids 574-1368 or 638-1368 of SpCas9.

[0171] By “subject” is meant a mammal, including, but not limited to, a human or non-human mammal, such as a bovine, equine, canine, ovine, or feline. Subjects include livestock, domesticated animals raised to produce labor and to provide commodities, such as food, including without limitation, cattle, goats, chickens, horses, pigs, rabbits, and sheep.

[0172] By “substantially identical” is meant a polypeptide or nucleic acid molecule exhibiting at least 50% identity to a reference amino acid sequence (for example, any one of the amino acid sequences described herein) or nucleic acid sequence (for example, any one of the nucleic acid sequences described herein). In one embodiment, such a sequence is at least 60%, 80% or 85%, 90%, 95% or even 99% identical at the amino acid level or nucleic acid to the sequence used for comparison.

[0173] Sequence identity is typically measured using sequence analysis software (for example, Sequence Analysis Software Package of the Genetics Computer Group, University of Wisconsin Biotechnology Center, 1710 University Avenue, Madison, Wis. 53705, BLAST, BESTFIT, GAP, or PILEUP/PRETTYBOX programs). Such software matches identical or similar sequences by assigning degrees of homology to various substitutions, deletions, and/or other modifications. Conservative substitutions typically include substitutions within the following groups: glycine, alanine; valine, isoleucine, leucine; aspartic acid, glutamic acid, asparagine, glutamine; serine, threonine; lysine, arginine; and phenylalanine, tyrosine. In an exemplary approach to determining the degree of identity, a BLAST program may be used, with a probability score between e⁻³ and e⁻¹⁰⁰ indicating a closely related sequence. COBALT is used, for example, with the following parameters:
[0174] a) alignment parameters: Gap penalties-11, -1 and End-Gap penalties-5, -1,
[0175] b) CDD Parameters: Use RPS BLAST on; Blast E-value 0.003; Find Conserved columns and Recompute on, and
[0176] c) Query Clustering Parameters: Use query clusters on; Word Size 4; Max cluster distance 0.8; Alphabet Regular.
   EMBOSS Needle is used, for example, with the following parameters:
[0177] a) Matrix: BLOSUM62;
[0178] b) GAP OPEN: 10;
[0179] c) GAP EXTEND: 0.5;
[0180] d) OUTPUT FORMAT: pair;
[0181] e) END GAP PENALTY: false;
[0182] f) END GAP OPEN: 10; and
[0183] g) END GAP EXTEND: 0.5.

[0184] The term “target site” refers to a sequence within a nucleic acid molecule that is modified by a nucleobase editor. In one embodiment, the target site is deaminated by a deaminase or a fusion protein comprising a deaminase (e.g., adenine deaminase).

[0185] As used herein, the terms “treat,” treating,” “treatment,” and the like refer to reducing or ameliorating a disease, disorder and/or symptoms associated therewith or obtaining a desired pharmacologic and/or physiologic effect. It will be appreciated that, although not precluded, treating a disorder or condition does not require that the disorder, condition or symptoms associated therewith be completely eliminated. In some embodiments, the effect is therapeutic, i.e., without limitation, the effect partially or completely reduces, diminishes, abrogates, abates, alleviates, decreases the intensity of, or cures a disease and/or adverse symptom attributable to the disease. In some embodiments, the effect is preventative, i.e., the effect protects or prevents an occurrence or reoccurrence of a disease or condition. To this end, the presently disclosed methods comprise administering a therapeutically effective amount of a compositions as described herein. In some embodiments, the disease or disorder is sickle cell disease (SCD) or ß-thalassemia.

[0186] By “uracil glycosylase inhibitor” or “UGI” is meant an agent that inhibits the uracil-excision repair system. In one embodiment, the agent is a protein or fragment thereof that binds a host uracil-DNA glycosylase and prevents removal of uracil residues from DNA. In an embodiment, a UGI is a protein, a fragment thereof, or a domain that is capable of inhibiting a uracil-DNA glycosylase base-excision repair enzyme. In some embodiments, a UGI domain comprises a wild-type UGI or a modified version thereof. In some embodiments, a UGI domain comprises a fragment of the exemplary amino acid sequence set forth below. In some embodiments, a UGI fragment comprises an amino acid sequence that comprises at least 60%, at least 65%, at least 70%, at least 75%, at least 80%, at least 85%, at least 90%, at least 95%, at least 96%, at least 97%, at least 98%, at least 99%, or 100% of the exemplary UGI sequence provided below. In some embodiments, a UGI comprises an amino acid sequence that is homologous to the exemplary UGI amino acid sequence or fragment thereof, as set forth below. In some embodiments, the UGI, or a portion thereof, is at least 70%, at least 75%, at least 80%, at least 85%, at least 90%, at least 95%, at least 96%, at least 97%, at least 98%, at least 99%, at least 99.5%, at least 99.9%, or 100% identical to a wild type UGI or a UGI sequence, or portion thereof, as set forth below. An exemplary UGI comprises an amino acid sequence as follows: >sp1P14739IUNGI BPPB2 Uracil-DNA glycosylase inhibitor

### MTNLSDIIEKETGKQLVIQESILMLPEEVEEVIGNKPESDILVHTAYDESTDENVMLLTSD APEYKPWALVIQDSNGENKIKML (SEQ ID NO: 75).

[0187] The term “vector” refers to a means of introducing a nucleic acid sequence into a cell, resulting in a transformed cell. Vectors include plasmids, transposons, phages, viruses, liposomes, and episome. “Expression vectors” are nucleic acid sequences comprising the nucleotide sequence to be expressed in the recipient cell. Expression vectors may include additional nucleic acid sequences to promote and/or facilitate the expression of the of the introduced sequence such as start, stop, enhancer, promoter, and secretion sequences.

[0188] Any compositions or methods provided herein can be combined with one or more of any of the other compositions and methods provided herein.

[0189] DNA editing has emerged as a viable means to modify disease states by correcting pathogenic mutations at the genetic level. Until recently, all DNA editing platforms have functioned by inducing a DNA double strand break (DSB) at a specified genomic site and relying on endogenous DNA repair pathways to determine the product outcome in a semi-stochastic manner, resulting in complex populations of genetic products. Though precise, user-defined repair outcomes can be achieved through the homology directed repair (HDR) pathway, a number of challenges have prevented high efficiency repair using HDR in therapeutically-relevant cell types. In practice, this pathway is inefficient relative to the competing, error-prone non-homologous end joining pathway. Further, HDR is tightly restricted to the G1 and S phases of the cell cycle, preventing precise repair of DSBs in post-mitotic cells. As a result, it has proven difficult or impossible to alter genomic sequences in a user-defined, programmable manner with high efficiencies in these populations.

### BRIEF DESCRIPTION OF THE DRAWINGS

[0190] FIGS. 1A-1C depict plasmids. FIG. 1A is an expression vector encoding a TadA7.10-dCas9 base editor. FIG. 1B is a plasmid comprising nucleic acid molecules encoding proteins that confer chloramphenicol resistance (CamR) and spectinomycin resistance (SpectR). The plasmid also comprises a kanamycin resistance gene disabled by two point mutations. FIG. 1C is a plasmid comprising nucleic acid molecules encoding proteins that confer chloramphenicol resistance (CamR) and spectinomycin resistance (SpectR). The plasmid also comprises a kanamycin resistance gene disabled by three point mutations.

[0191] FIG. 2 presents images of bacterial colonies transduced with the expression vectors depicted in FIG. 1, which included a defective kanamycin resistance gene. The vectors contained ABE7.10 variants that were generated using error prone PCR. Bacterial cells expressing these “evolved” ABE7.10 variants were selected for kanamycin resistance using increasing concentrations of kanamycin. Bacteria expressing ABE7.10 variants having adenosine deaminase activity were capable of correcting the mutations introduced into the kanamycin resistance gene, thereby restoring kanamycin resistance. The kanamycin resistant cells were selected for further analysis.

[0192] FIGS. 3A and 3B illustrate editing of a regulatory region of the hemoglobin subunit gamma (HGB1) locus, which is a therapeutically relevant site for upregulation of fetal hemoglobin. FIG. 3A is a graph that quantifies the efficiency and specificity of adenosine deaminase variants listed in Table 15. FIG. 3B is a drawing of a portion of the regulatory region for the HGB1 gene. FIG. 3B discloses SEQ ID NO: 296. Editing is assayed at the hemoglobin subunit gamma 1 (HGB1) locus in HEK293T cells, which is therapeutically relevant site for upregulation of fetal hemoglobin. The top panel depicts nucleotide residues in the target region of the regulatory sequence of the HGB1 gene. A5, A8, A9, and A11 denote the edited adenosine residues in HGB1. FIG. 3A discloses SEQ ID NO: 295.

[0193] FIG. 4 illustrates the relative effectiveness of adenosine base editors comprising a dCas9 that recognizes a noncanonical PAM sequence. The top panel depicts the coding sequence of the hemoglobin subunit. The bottom panel is a graph demonstrating the efficiency of adenosine deaminase variant base editors with guide RNAs of varying lengths. FIG. 4 discloses SEQ ID NOS 297-298, respectively, in order of appearance.

[0194] FIG. 5 is a graph illustrating the efficiency and specificity of ABE8s. The percent editing at intended target nucleotides and unintended target nucleotides (bystanders) is quantified. FIG. 5 discloses SEQ ID NOS 299-300, respectively, in order of appearance.

[0195] FIG. 6 is a graph illustrating the efficiency and specificity of ABE8s. The percent editing at intended target nucleotides and unintended target nucleotides (bystanders) is quantified.

[0196] FIGS. 7A-7C depict a schematic and bar graphs related to A•T to G•C conversion and phenotypic outcomes in primary cells. FIG. 7A presents a schematic drawing of embryonic, fetal and adult globin genes situated on chromosome 11 and indicates the HBG1/2 HPFH sites at which a single base editor introduces duplex editing. FIG. 7B is a graph depicting DNA editing efficiency in CD34+ cells. Shown is A•T to G•C conversion at the −198 HBG1/2 promoter site in CD34+ cells treated with ABE from two separate donors. NGS analysis conducted at 48 and 144h post treatment. The −198 HBG1/2 target sequence is as follows: GTGGGGA₇AGGGGCCCCCAAGAGG (SEQ ID NO: 76) with A7 in bold and double-underline. Percent A•T to G•C plotted for A7. FIG. 7C is a graph reflecting percent γ-globin/α-globin expression in erythrocytes derived from ABE-edited cells. Shown in FIG. 7C is the percentage of γ-globin formed as a fraction of alpha-globin. Values for FIGS. 7B and 7C are shown from two different donors, post ABE treatment and erythroid differentiation. As observed in FIG. 7B, ABE8 editing efficiencies at the −198 HBG1/2 promoter target site were comparatively 2-3 times higher at early time points (48 hr). As observed in FIG. 7C, the ABE8 editing in CD34+ cells yielded an approximately 1.4-fold increase in γ-globin formation in differentiated erythrocytes. By way of example, the ABE8.13-d base editor resulted in 55% γ-globin/α-globin expression.

[0197] FIGS. 8A and 8B depict A•T to G•C conversion of CD34+ cells treated with ABE8 at the −198 promoter site upstream of HBG1/2. FIG. 8A is a heat map depicting A to G editing frequency of ABE8s in CD34+ cells from two donors, where Donor 2 is heterozygous for sickle cell disease, at 48 and 144h post editor treatment. FIG. 8B is a graphical representation of distribution of total sequencing reads which contain either A7 only edits or combined (A7+A8) edits.

[0198] FIG. 9 is a heat map depicting INDEL frequency of CD34+ cells treated with ABE8 at the −198 site of the gamma-globin promoter. Frequencies shown from two donors at 48h and 144h time points. Complete A•T to G•C conversion at the HBG1/2-198 promoter target site as described herein creates a poly-G stretch of 10-nt. Because such homopolymer runs often increase the rate of PCR- and sequencing-induced errors, elevated INDEL frequencies are observed at this site.

[0199] FIG. 10 depicts an ultra-high performance liquid chromatography (UHPLC) UV-Vis trace (220 nm) and integration of globin chain levels of untreated differentiated CD34+ cells (donor 1).

[0200] FIG. 11 depicts an UHPLC UV-Vis trace (220 nm) and integration of globin chain levels of differentiated CD34+ cells treated with ABE7.10-m (donor 1)

[0201] FIG. 12 depicts an UHPLC UV-Vis trace (220 nm) and integration of globin chain levels of differentiated CD34+ cells treated with ABE7.10-d (donor 1).

[0202] FIG. 13 depicts an UHPLC UV-Vis trace (220 nm) and integration of globin chain levels of differentiated CD34+ cells treated with ABE8.8-m (donor 1) FIG. 14 depicts an UHPLC UV-Vis trace (220 nm) and integration of globin chain levels of differentiated CD34+ cells treated with ABE8.8-d (donor 1).

[0203] FIG. 15 depicts an UHPLC UV-Vis trace (220 nm) and integration of globin chain levels of differentiated CD34+ cells treated with ABE8.13-m (donor 1).

[0204] FIG. 16 depicts an UHPLC UV-Vis trace (220 nm) and integration of globin chain levels of differentiated CD34+ cells treated with ABE8.13-d (donor 1).

[0205] FIG. 17 depicts an UHPLC UV-Vis trace (220 nm) and integration of globin chain levels of differentiated CD34+ cells treated with ABE8.17-m (donor 1).

[0206] FIG. 18 depicts an UHPLC UV-Vis trace (220 nm) and integration of globin chain levels of differentiated CD34+ cells treated with ABE8.17-d (donor 1).

[0207] FIG. 19 depicts an UHPLC UV-Vis trace (220 nm) and integration of globin chain levels of differentiated CD34+ cells treated with ABE8.20-m (donor 1).

[0208] FIG. 20 depicts an UHPLC UV-Vis trace (220 nm) and integration of globin chain levels of differentiated CD34+ cells treated with ABE8.20-d (donor 1).

[0209] FIG. 21 depicts an UHPLC UV-Vis trace (220 nm) and integration of globin chain levels of differentiated CD34+ cells untreated (donor 2). Note: donor 2 is heterozygous for sickle cell disease.

[0210] FIG. 22 depicts an UHPLC UV-Vis trace (220 nm) and integration of globin chain levels of differentiated CD34+ cells treated with ABE7.10-m (donor 2). Note: donor 2 is heterozygous for sickle cell disease.

[0211] FIG. 23 depicts an UHPLC UV-Vis trace (220 nm) and integration of globin chain levels of differentiated CD34+ cells treated with ABE7.10-d (donor 2). Note: donor 2 is heterozygous for sickle cell disease.

[0212] FIG. 24 depicts an UHPLC UV-Vis trace (220 nm) and integration of globin chain levels of differentiated CD34+ cells treated with ABE8.8-m (donor 2). Note: donor 2 is heterozygous for sickle cell disease.

[0213] FIG. 25 depicts an UHPLC UV-Vis trace (220 nm) and integration of globin chain levels of differentiated CD34+ cells treated with ABE8.8-d (donor 2). Note: donor 2 is heterozygous for sickle cell disease.

[0214] FIG. 26 depicts an UHPLC UV-Vis trace (220 nm) and integration of globin chain levels of differentiated CD34+ cells treated with ABE8.13-m (donor 2). Note: donor 2 is heterozygous for sickle cell disease.

[0215] FIG. 27 depicts an UHPLC UV-Vis trace (220 nm) and integration of globin chain levels of differentiated CD34+ cells treated with ABE8.13-d (donor 2). Note: donor 2 is heterozygous for sickle cell disease.

[0216] FIG. 28 depicts an UHPLC UV-Vis trace (220 nm) and integration of globin chain levels of differentiated CD34+ cells treated with ABE8.17-m (donor 1).

[0217] FIG. 29 depicts an UHPLC UV-Vis trace (220 nm) and integration of globin chain levels of differentiated CD34+ cells treated with ABE8.17-d (donor 2). Note: donor 2 is heterozygous for sickle cell disease.

[0218] FIGS. 30A and 30B depict UHPLC UV-Vis traces (220 nm) and integration of globin chain levels of differentiated CD34+ cells treated with ABE8s. FIG. 30A depicts an UHPLC UV-Vis trace (220 nm) and integration of globin chain levels of differentiated CD34+ cells treated with ABE8.20-m (donor 2). Note: donor 2 is heterozygous for sickle cell disease. FIG. 30B depicts an UHPLC UV-Vis trace (220 nm) and integration of globin chain levels of differentiated CD34+ cells treated with ABE8.20-d (donor 2). Note: donor 2 is heterozygous for sickle cell disease.

[0219] FIG. 31A-31E depict editing with ABE8.8 at two independent sites reached over 90% editing on day 11 post erythroid differentiation before enucleation and about 60% of gamma globin over alpha globin or total beta family globin on day 18 post erythroid differentiation. FIG. 31A is a graph depicting an average of ABE8.8 editing in 2 healthy donors in 2 independent experiments. Editing efficiency was measured with primers that distinguish HBG1 and HBG2. FIG. 31B is a graph depicting an average of 1 healthy donor in 2 independent experiments. Editing efficiency was measured with primers that recognize both HBG1 and HBG2. FIG. 31C is a graph depicting editing of ABE8.8 in a donor with heterozygous E6V mutation. FIGS. 31D and 31E are graphs depicting gamma globin increase in the ABE8.8 edited cells.

[0220] FIGS. 32A and 32B depict percent editing using ABE variants to correct sickle cell mutations. FIG. 32A is a graph depicting a screen of different editor variants with about 70% editing in SCD patient fibroblasts. FIG. 32B is a graph depicting CD34 cells from healthy donors edited with a lead ABE variant, targeting a synonymous mutation A13 in an adjacent proline that resides within the editing window and serves as a proxy for editing the SCD mutation. ABE8 variants showed an average editing frequency around 40% at the proxy A13.

[0221] FIGS. 33A and 33B depict RNA amplicon sequencing to detect cellular A-to-I editing in RNA associated with ABE treatment. Individual data points are shown and error bars represent s.d. for n=3 independent biological replicates, performed on different days. FIG. 33A is a graph depicting A-to-I editing frequencies in targeted RNA amplicons for core ABE 8 constructs as compared to ABET and Cas9(D10A) nickase control. FIG. 33B is a graph depicting A-to-I editing frequencies in targeted RNA amplicons for ABE8 with mutations that have been reported to improve RNA off-target editing.

[0222] FIGS. 34A and 34B present graphs and UPHLC chromatographic traces related to editing of SCD CD34+ cells. CD34+ cells from a patient having SCD were transfected with ABE8.8 mRNA and sgRNA (HBG1/2, 50 nM) using electroporation. Edited cells were differentiated to erythroid cells in vitro. The editing rate at HBG1/2 promoters was measured by Next-Genome Sequencing (NGS). As shown in FIG. 34A, 16.5% editing by the ABE8.8 base editor was observed at 48 hours post differentiation, and 89.2% editing was measured on day 14 post differentiation. FIG. 34B shows the breakdown of bystander editing at 48 hours and on day 14 post-differentiation.

[0223] FIGS. 35A-35D present UPHLC chromatographic traces of globin levels and graphs related to functional readout of HbF upregulation and HbS downregulation in SCD CD34+ cells subjected to editing as described for FIGS. 34A and 34B. Edited SCD CD34+ cells were differentiated to erythroid cells and globin levels were analyzed on day 18 post differentiation. FIG. 35A presents a trace showing globin levels in erythroid cells differentiated from unedited SCD CD34+ cells. FIG. 35B presents a trace showing globin levels in erythroid cells differentiated from edited SCD CD34+ cells. FIG. 35C shows that 63.2% of γ globin level was detected in erythroid cells differentiated from edited SCD CD34+ cells versus unedited cells. FIG. 35D shows that S globin was reduced from 86% to 32.9% differentiated from edited SCD CD34+ cells versus unedited cells. The upregulation of fetal hemoglobin is an approach that is advantageous for the treatment of SCD as well as beta-thalassemia.

[0224] FIGS. 36A-36C show a ribbon structure, target sequence, and graph related to the generation of a variant of the ABE editor for editing a non-canonical Cas9 NGG PAM sequence. Designing an ABE base editor containing a modified SpCas9 including MQKFRAER amino acid substitutions and having specificity for the altered PAM 5′-NGC-3′ as described herein (FIG. 36A), allowed for targeting the sickle allele (“target A”) within the editing window of ABE as shown in FIG. 36B, thereby providing ability to directly edit this position in the target site, which would not normally be accessible using a traditional spCas9. FIG. 36B discloses SEQ ID NOS 299-300, respectively, in order of appearance. FIG. 36C shows a graph of the base editing activities of variant editors containing the MQKFRAER amino acid substitutions, which allow recognition of the target site and the conversion of nucleobase A to nucleobase T (A•T) to achieve the desired correction of the Val->Ala. For each variant plotted on the x-axis, “Pro→Pro” represents the leftmost bar; “Val→Ala” represents the middle bar; and “Ser→Pro” represents the rightmost bar.

[0225] FIG. 37 presents a graph, target site sequence and table related to the generation of additional adenosine deaminase variants in which the linker to the TadA was removed and placed in closer proximity to the Cas9 complex. These variants exhibited increased efficacy in editing of a model cell line (HEK293T) that expressed the sickle allele target site. The term “ISLAY” or “IBE” refers to base editors that have an insertion of the TadA adenosine deaminase within the Cas9 sequence, for example, ISLAY1 V1015, ISLAY2 I1022, ISLAY3 I1029, ISLAY4 E1040, ISLAY5 E1058, ISLAY6 G1347, ISLAY7 E1054, ISLAY8 E1026 and ISLAY9 Q768, as set forth in Table 14A infra. At the right side of the figure, the target site in the nucleic acid sequence (SEQ ID NO: 301), the PAM site and the corresponding amino acid sequence (SEQ ID NO: 302) are shown. “Cp5” (MSP552) in the table refers to an ABE8 in a scaffold that includes a circular permutant Cas9 having the amino acid sequence below and as described infra.

(SEQ ID NO: 77)
MSEVEFSHEYWMRHALTLAKRAWDEREVPVGAVLVHNNRVIGEGWNRPIG
RHDPTAHAEIMALRQGGLVMQNYRLIDATLYVTLEPCVMCAGAMIHSRIG
RVVFGARDAKTGAAGSLMDVLHHPGMNHRVEITEGILADECAALLSDFFR
MRRQEIKAQKKAQSSTDSGGSSGGSSGSETPGTSESATPESSGGSSGGSS
EVEFSHEYWMRHALTLAKRARDEREVPVGAVLVLNNRVIGEGWNRAIGLH
DPTAHAEIMALRQGGLVMQNYRLIDATLYSTFEPCVMCAGAMIHSRIGRV
VFGVRNAKTGAAGSLMDVLHYPGMNHRVEITEGILADECAALLCYFFRMP
RQVFNAQKKAQSSTDSGGSSGGSSGSETPGTSESATPESSGGSSGGSEIG
KATAKYFFYSNIMNFFKTEITLANGEIRKRPLIETNGETGEIVWDKGRDF
ATVRKVLSMPQVNIVKKTEVQTGGFSKESILPKRNSDKLIARKKDWDPKK
YGGFMQPTVAYSVLVVAKVEKGKSKKLKSVKELLGITIMERSSFEKNPID
FLEAKGYKEVKKDLIIKLPKYSLFELENGRKRMLASAKFLQKGNELALPS
KYVNFLYLASHYEKLKGSPEDNEQKQLFVEQHKHYLDEIIEQISEFSKRV
ILADANLDKVLSAYNKHRDKPIREQAENIIHLFTLTNLGAPRAFKYFDTT
IARKEYRSTKEVLDATLIHQSITGLYETRIDLSQLGGDGGSGGSGGSGGS
GGSGGSGGMDKKYSIGLAIGTNSVGWAVITDEYKVPSKKFKVLGNTDRHS
IKKNLIGALLFDSGETAEATRLKRTARRRYTRRKNRICYLQEIFSNEMAK
VDDSFFHRLEESFLVEEDKKHERHPIFGNIVDEVAYHEKYPTIYHLRKKL
VDSTDKADLRLIYLALAHMIKFRGHFLIEGDLNPDNSDVDKLFIQLVQTY
NQLFEENPINASGVDAKAILSARLSKSRRLENLIAQLPGEKKNGLFGNLI
ALSLGLTPNFKSNFDLAEDAKLQLSKDTYDDDLDNLLAQIGDQYADLFLA
AKNLSDAILLSDILRVNTEITKAPLSASMIKRYDEHHQDLTLLKALVRQQ
LPEKYKEIFFDQSKNGYAGYIDGGASQEEFYKFIKPILEKMDGTEELLVK
LNREDLLRKQRTFDNGSIPHQIHLGELHAILRRQEDFYPFLKDNREKIEK
ILTFRIPYYVGPLARGNSRFAWMTRKSEETITPWNFEEVVDKGASAQSFI
ERMTNFDKNLPNEKVLPKHSLLYEYFTVYNELTKVKYVTEGMRKPAFLSG
EQKKAIVDLLFKTNRKVTVKQLKEDYFKKIECFDSVEISGVEDRFNASLG
TYHDLLKIIKDKDFLDNEENEDILEDIVLTLTLFEDREMIEERLKTYAHL
FDDKVMKQLKRRRYTGWGRLSRKLINGIRDKQSGKTILDFLKSDGFANRN
FMQLIHDDSLTFKEDIQKAQVSGQGDSLHEHIANLAGSPAIKKGILQTVK
VVDELVKVMGRHKPENIVIEMARENQTTQKGQKNSRERMKRIEEGIKELG
SQILKEHPVENTQLQNEKLYLYYLQNGRDMYVDQELDINRLSDYDVDHIV
PQSFLKDDSIDNKVLTRSDKNRGKSDNVPSEEVVKKMKNYWRQLLNAKLI
TQRKFDNLTKAERGGLSELDKAGFIKRQLVETRQITKHVAQILDSRMNTK
YDENDKLIREVKVITLKSKLVSDFRKDFQFYKVREINNYHHAHDAYLNAV
VGTALIKKYPKLESEFVYGDYKVYDVRKMIAKSEQEGADKRTADGSEFES
PKKKRKV

For the experiments, 20nt guide sgRNA (1000 ng), spCas9-MQKFRAER, having specificity for NGC PAM, were used to transform HEK293T cells (2×10⁵ cells/well) in triplicate.

[0226] FIGS. 38 and 39 show schematic representations of the different adenosine deaminase ISLAY variants that demonstrated increased editing of the target site (as shown in FIG. 37). Schematically shown for comparison in the middle panels are other ABE editors (ABE7.10) with a linker to the TadA domain. FIGS. 38 and 39 disclose SEQ ID NOS 303-304, respectively, in order of appearance.

[0227] FIG. 40 shows bar graphs depicting percentage of base editing achieved in CD34+ cells that expressed the SCD target site and a table showing edited nucleic acids and amino acid changes. CD34+ cells from a heterozygous sickle trait patient were treated with ABE editors and editing of the target site (9G), i.e., conversion of nucleobase A to nucleobase T to achieve the desired correction of the Val>Ala, was measured. Greater than 50% editing of the sickle cell allele by the variant ABE editors was achieved in the CD34+ cells at 96 hours post electroporation. This was sustained after the cells had differentiated into red blood cells in vitro (IVD), as greater than 60% editing was shown in differentiated erythroid cells (heterozygous for sickle trait) 12 days after erythroid differentiation. For the graphs, Editor nM mRNA_[sgRNA]:[mRNA]_Timepoint are evaluated, and 21nt gRNA was utilized. FIG. 40 discloses SEQ ID NOS 305-307, respectively, in order of appearance.

[0228] FIGS. 41A and 41B present an ultra-high-performance liquid chromatography (UHPLC) chromatographic trace and LC-MS results related to the detection of distinct ß-globin species in edited heterozygous HbS (ß-globin in sickle cells) differentiated erythroid cells. Prior to these studies and analyses, discriminating and separating the HbG Makassar variant globin from HbS sickle globin variant using conventional methods were routinely unsuccessful by practitioners in the art. A UHPLC method was developed and used herein to discriminate between these two different globin variants in cells, e.g., CD34+ cells, from SCD patients that had been edited using ABE8 editors as described herein. Following editing of CD34+ cells from a heterozygous HbSS sample, different beta globin (Hb) variants corresponding to those having the Val→Ala substitution could be detected based on molecular weight using UHPLC (FIG. 41A). The edit peak analyzed by Liquid Chromatography-Mass Spectrometry (LC-MS) shows the charge envelope indicating a distinct, new beta globin variant (Makassar variant), (FIG. 41B).

[0229] FIG. 42 presents a table of base editors and sgRNA sequences for base editing SCD samples with an HbS globin variant to achieve correction to an HbG Makassar variant globin. ABE8 mutations were introduced into leading editor candidates and sgRNA of different lengths (21nt (SEQ ID NO: 308), 20nt (SEQ ID NO: 309), 19nt (SEQ ID NO: 310) protospacers) were assessed to examine whether on-target editing could be improved while reducing potentially harmful 1G edit (Ser10Pro conversion). The “A” nucleotide in bold/italics/underline depicts the sickle substitution. The lowercase letters in the sgRNA/protospacer sequences indicate nucleobases that are 2′-O-methylated. The lowercase “s” in the sgRNA/protospacer sequences indicates phosphorothioates.

[0230] FIGS. 43A and 43B show bar graphs of total percent editing at the 9G target site (or 9G and other sites) in CD34+ cells (heterozygous sickle cell trait sample) by different ABE editors at 48h post electroporation (FIG. 43A) or in in vitro differentiated erythroid cells (heterozygous sickle trait sample) 7d after differentiation (FIG. 43B). While additional mutations did not greatly improve on-target editing, 4 editors demonstrated comparable on-targeting editing efficiency. 20nt sgRNA length achieved lower 1G undesired bystander editing. For these graphs, Editor_sgRNA nt or Editor_100 nM mRNA_μM sgRNA (20nt) are evaluated. Editing was maintained throughout erythroid differentiation in vitro, nearing 80%.

[0231] FIGS. 44A and 44B present bar graphs and a table showing edited nucleic acid sequence and corresponding amino acid sequence conversion related to total base editing at position 9G of HbS in homozygous SCD (HbSS) samples. Cells were obtained from a whole blood (non-mobilized) sample from a patient with SCD (HbSS) and subjected to base editing using ABE variant base editors. FIG. 44A: CD34+ cells (˜200,000 cells, homozygous SCD sample)) were electroporated with 50 nM ABE variant editor (MSP619 (ISLAY5)) at a 100:1 ratio (2 μg of mRNA, 4.1 μg of sgRNA (21nt)). The ABE variant base editors achieved approximately 65% editing at position 9G in the cells at 7d following electroporation, and about 60% editing at position 9G at 14d following electroporation. FIG. 44B: CD34+ cells (˜200,000 cells, homozygous SCD sample)) were electroporated with 30 nM ABE variant editor (MSP616 (ISLAY2)) at a 200:1 ratio (1.3 μg of mRNA, 4.95 μg of sgRNA (21nt)). The ABE variant base editors achieved at least approximately 50% editing at position 9G in the erythroid cells at 7d and 14 d following electroporation. FIG. 44B discloses SEQ ID NOS 305-307, respectively, in order of appearance.

[0232] FIG. 45 presents a UHPLC chromatographic trace following UHPLC analysis, which shows a clear separation of and discrimination between the HbS form and the HbG Makassar variant forms of globin proteins following base editing using ABE variant base editors in homozygous HbSS cells obtained from a SCD patient sample.

[0233] FIGS. 46A and 46B present a UHPLC chromatographic trace and LC-MS results related to the detection of distinct ß-globin species in edited heterozygous HbS (ß-globin in sickle cells) differentiated erythroid cells. As described for FIGS. 41A and 41B, UHPLC was used to discriminate these two different globin variants. In an edited heterozygous HbSS sample, different beta globin (Hb) variants corresponding to those having the Val→Ala substitution could be detected based on molecular weight (FIG. 46A). The edit peak in the LC-MS trace shows the charge envelope indicating a new beta globin variant (FIG. 46B).

[0234] FIG. 47 shows UHPLC chromatographic traces and LC-MS results of HbSS (SCD) samples subjected to base editing (“HbSS-edited”) or not subjected to base editing (“HbSS-unedited”). As shown in the top and middle UHPLC chromatographs, the HbG Makassar globin variant (at 9.81 min) is distinguished from the HbS (SCD) globin form (10.03 min) based on elution time differentials on UHPLC. The other globin forms are readily distinguished. In the bottom LC-MS graph, the Makassar HbG variant and the HbS form of globin have different and distinguishable identities. Similar to the results presented for FIGS. 41A, 41B, 45, 46A and 46B, the UHPLC and LC-MS analyses of cells from SCD (HbSS) erythroid cell samples edited with the ABE variant base editors described herein provide clear identification and separation of the HbG Makassar variant and the HbS (SCD) globin variant in the samples, thus providing a beneficial means of identifying authentic SCD (HbS) patients and of alleviating or preventing misdiagnosis of SCD (HbSS) in patients who instead present with the HbG Makassar globin variant.

[0235] FIGS. 48A-48C show bar graphs representing relative areas under the peaks of UHPLC chromatography data. The area under the peaks was used to quantify the total change in amount of the different ß-globin variants in a homozygous SCD sample that had been subjected to base editing employing an ABE variant of the invention. (Base Editor MSP619, 50 nM mRNA, 5000 nM sgRNA (21nt)). The results presented suggest that the levels of conversion of the HbS variant globin to the asymptomatic HbG-Makassar globin are directly correlated.

[0236] FIG. 49 is a table depicting Cas9 variants for accessing all possible PAMs within the NRNN PAM space. Only Cas9 variants that require recognition of three or fewer defined nucleotides in their PAMs are listed. The non-G PAM variants include SpCas9-NRRH, SpCas9-NRTH, and SpCas9-NRCH. (Miller, S. M., et al. Continuous evolution of SpCas9 variants compatible with non-G PAMs, Nat. Biotechnol. (2020), (//doi.org/10.1038/s41587-020-0412-8), the contents of which are incorporated herein by reference in their entirety.

### DETAILED DESCRIPTION OF THE INVENTION

[0237] As described below, the present invention features compositions and methods for altering mutations associated with sickle cell disease (SCD). In some embodiments, the editing corrects a deleterious mutation, such that the edited polynucleotide is indistinguishable from a wild-type reference polynucleotide sequence. In another embodiment, the editing alters the deleterious mutation, such that the edited polynucleotide comprises a benign mutation.

### HBB Gene Editing

[0238] As described herein, the compositions and methods of the invention are useful and advantageous for the treatment of sickle cell disease (SCD), which is caused by a Glu→Val mutation at the sixth amino acid of the β-globin protein encoded by the HBB gene. Despite many developments to date in the field of gene editing, precise correction of the diseased HBB gene to revert Val→Glu remains elusive and is presently not achievable using either CRISPR/Cas nuclease or CRISPR/Cas base editing approaches.

[0239] Genome editing of the HBB gene to replace the affected nucleotide using a CRISPR/Cas nuclease approach requires cleavage of genomic DNA. However, cleavage of genomic DNA carries an increased risk of generating base insertions/deletions (indels), which have the potential to cause unintended and undesirable consequences, including generating premature stop codons, altering the codon reading frame, etc. Furthermore, generating double-stranded breaks at the β-globin locus has the potential to radically alter the locus through recombination events. The β-globin locus contains a cluster of globin genes having sequence identity to one another—5′-ε-; Gγ-; Aγ-; δ-; and β-globin-3′. Because of the structure of the β-globin locus, recombination repair of a double-stranded break within the locus has the potential to result in gene loss of intervening sequences between globin genes, for example between δ- and β-globin genes.

[0240] Unintended alterations to the locus also carry a risk of causing thalassemia. CRISPR/Cas base editing approaches hold promise in that they have the ability to generate precise alterations at the nucleobase level. However, precise correction of Val 4 Glu (GTG→GAG) requires a T•A to A•T transversion editor, which is not presently known to exist. Additionally, the specificity of CRISPR/Cas base editing is due in part to a limited window of editable nucleotides created by R-loop formation upon CRISPR/Cas binding to DNA. Thus, CRISPR/Cas targeting must occur at or near the sickle cell site to allow base editing to be possible, and there may be additional sequence requirements for optimal editing within the window. One requirement for CRISPR/Cas targeting is the presence of a protospacer-adjacent motif (PAM) flanking the site to be targeted. For example, many base editors are based on SpCas9 which requires an NGG PAM. Even assuming hypothetically that an T•A to A•T transversion were possible, no NGG PAM exists that would place the target “A” at a desirable position for such an SpCas9 base editor. Although many new CRISPR/Cas proteins have been discovered or generated that expand the collection of available PAMs, PAM requirements remain a limiting factor in the ability to direct CRISPR/Cas base editors to specific nucleotides at any location in the genome.

[0241] The present invention is based, at least in part, on several discoveries described herein that address the foregoing challenges for providing a genome editing approach for treatment of sickle cell anemia. In one aspect, the invention is based in part on the ability to replace the valine at amino acid position 6, which causes sickle cell disease, with an alanine, to thereby generate an Hb variant (Hb Makassar) that does not generate a sickle cell phenotype. While precise correction (GTG→GAG) is not possible without a T•A to A•T transversion base editor, the studies performed herein have found that a Val→Ala (GTG→GCG) replacement (i.e., the Hb Makassar variant) can be generated using an A•T to G•C base editor (ABE). This was achieved in part by the development of novel base editors and novel base editing strategies, as provided herein. For example, novel ABE base editors (i.e., having an adenosine deaminase domain) that utilize flanking sequences (e.g., PAM sequences; zinc finger binding sequences) for optimal base editing at the sickle cell target site.

[0242] Thus, the present invention includes compositions and methods for base editing a thymidine (T) to a cytidine (C) in the codon of the sixth amino acid of a sickle cell disease variant of the β-globin protein (Sickle HbS; E6V), thereby substituting an alanine for a valine (V6A) at this amino acid position. Substitution of alanine for valine at position 6 of HbS generates a β-globin protein variant that does not have a sickle cell phenotype (e.g., does not have the potential to polymerize as in the case of the pathogenic variant HbS). Accordingly, the compositions and methods of the invention are useful for the treatment of sickle cell disease (SCD).

### Nucleobase Editor

[0243] Disclosed herein is a base editor or a nucleobase editor for editing, modifying or altering a target nucleotide sequence of a polynucleotide (e.g., HBB polynucleotide). Described herein is a nucleobase editor or a base editor comprising a polynucleotide programmable nucleotide binding domain and a nucleobase editing domain (e.g., adenosine deaminase). A polynucleotide programmable nucleotide binding domain, when in conjunction with a bound guide polynucleotide (e.g., gRNA), can specifically bind to a target polynucleotide sequence (i.e., via complementary base pairing between bases of the bound guide nucleic acid and bases of the target polynucleotide sequence) and thereby localize the base editor to the target nucleic acid sequence desired to be edited. In some embodiments, the target polynucleotide sequence comprises single-stranded DNA or double-stranded DNA. In some embodiments, the target polynucleotide sequence comprises RNA. In some embodiments, the target polynucleotide sequence comprises a DNA-RNA hybrid.

### Polynucleotide Programmable Nucleotide Binding Domain

[0244] It should be appreciated that polynucleotide programmable nucleotide binding domains can also include nucleic acid programmable proteins that bind RNA. For example, the polynucleotide programmable nucleotide binding domain can be associated with a nucleic acid that guides the polynucleotide programmable nucleotide binding domain to an RNA. Other nucleic acid programmable DNA binding proteins are also within the scope of this disclosure, though they are not specifically listed in this disclosure.

[0245] A polynucleotide programmable nucleotide binding domain of a base editor can itself comprise one or more domains. For example, a polynucleotide programmable nucleotide binding domain can comprise one or more nuclease domains. In some embodiments, the nuclease domain of a polynucleotide programmable nucleotide binding domain can comprise an endonuclease or an exonuclease. Herein the term “exonuclease” refers to a protein or polypeptide capable of digesting a nucleic acid (e.g., RNA or DNA) from free ends, and the term “endonuclease” refers to a protein or polypeptide capable of catalyzing (e.g., cleaving) internal regions in a nucleic acid (e.g., DNA or RNA). In some embodiments, an endonuclease can cleave a single strand of a double-stranded nucleic acid. In some embodiments, an endonuclease can cleave both strands of a double-stranded nucleic acid molecule. In some embodiments a polynucleotide programmable nucleotide binding domain can be a deoxyribonuclease. In some embodiments a polynucleotide programmable nucleotide binding domain can be a ribonuclease.

[0246] In some embodiments, a nuclease domain of a polynucleotide programmable nucleotide binding domain can cut zero, one, or two strands of a target polynucleotide. In some embodiments, the polynucleotide programmable nucleotide binding domain can comprise a nickase domain. Herein the term “nickase” refers to a polynucleotide programmable nucleotide binding domain comprising a nuclease domain that is capable of cleaving only one strand of the two strands in a duplexed nucleic acid molecule (e.g., DNA). In some embodiments, a nickase can be derived from a fully catalytically active (e.g., natural) form of a polynucleotide programmable nucleotide binding domain by introducing one or more mutations into the active polynucleotide programmable nucleotide binding domain. For example, where a polynucleotide programmable nucleotide binding domain comprises a nickase domain derived from Cas9, the Cas9-derived nickase domain can include a D10A mutation and a histidine at position 840. In such cases, the residue H840 retains catalytic activity and can thereby cleave a single strand of the nucleic acid duplex. In another example, a Cas9-derived nickase domain can comprise an H840A mutation, while the amino acid residue at position 10 remains a D. In some embodiments, a nickase can be derived from a fully catalytically active (e.g., natural) form of a polynucleotide programmable nucleotide binding domain by removing all or a portion of a nuclease domain that is not required for the nickase activity. For example, where a polynucleotide programmable nucleotide binding domain comprises a nickase domain derived from Cas9, the Cas9-derived nickase domain can comprise a deletion of all or a portion of the RuvC domain or the HNH domain.

[0247] The amino acid sequence of an exemplary catalytically active Cas9 is as follows:

(SEQ ID NO: 1)
[sequence omitted]

[0248] A base editor comprising a polynucleotide programmable nucleotide binding domain comprising a nickase domain is thus able to generate a single-strand DNA break (nick) at a specific polynucleotide target sequence (e.g., determined by the complementary sequence of a bound guide nucleic acid). In some embodiments, the strand of a nucleic acid duplex target polynucleotide sequence that is cleaved by a base editor comprising a nickase domain (e.g., Cas9-derived nickase domain) is the strand that is not edited by the base editor (i.e., the strand that is cleaved by the base editor is opposite to a strand comprising a base to be edited). In other embodiments, a base editor comprising a nickase domain (e.g., Cas9-derived nickase domain) can cleave the strand of a DNA molecule which is being targeted for editing. In such cases, the non-targeted strand is not cleaved.

[0249] Also provided herein are base editors comprising a polynucleotide programmable nucleotide binding domain which is catalytically dead (i.e., incapable of cleaving a target polynucleotide sequence). Herein the terms “catalytically dead” and “nuclease dead” are used interchangeably to refer to a polynucleotide programmable nucleotide binding domain which has one or more mutations and/or deletions resulting in its inability to cleave a strand of a nucleic acid. In some embodiments, a catalytically dead polynucleotide programmable nucleotide binding domain base editor can lack nuclease activity as a result of specific point mutations in one or more nuclease domains. For example, in the case of a base editor comprising a Cas9 domain, the Cas9 can comprise both a D10A mutation and an H840A mutation. Such mutations inactivate both nuclease domains, thereby resulting in the loss of nuclease activity. In other embodiments, a catalytically dead polynucleotide programmable nucleotide binding domain can comprise one or more deletions of all or a portion of a catalytic domain (e.g., RuvC1 and/or HNH domains). In further embodiments, a catalytically dead polynucleotide programmable nucleotide binding domain comprises a point mutation (e.g., D10A or H840A) as well as a deletion of all or a portion of a nuclease domain.

[0250] Also contemplated herein are mutations capable of generating a catalytically dead polynucleotide programmable nucleotide binding domain from a previously functional version of the polynucleotide programmable nucleotide binding domain. For example, in the case of catalytically dead Cas9 (“dCas9”), variants having mutations other than D10A and H840A are provided, which result in nuclease inactivated Cas9. Such mutations, by way of example, include other amino acid substitutions at D10 and H840, or other substitutions within the nuclease domains of Cas9 (e.g., substitutions in the HNH nuclease subdomain and/or the RuvC1 subdomain). Additional suitable nuclease-inactive dCas9 domains can be apparent to those of skill in the art based on this disclosure and knowledge in the field and are within the scope of this disclosure. Such additional exemplary suitable nuclease-inactive Cas9 domains include, but are not limited to, D10A/H840A, D10A/D839A/H840A, and D10A/D839A/H840A/N863A mutant domains (See, e.g., Prashant et al., CAS9 transcriptional activators for target specificity screening and paired nickases for cooperative genome engineering. Nature Biotechnology. 2013; 31(9): 833-838, the entire contents of which are incorporated herein by reference).

[0251] Non-limiting examples of a polynucleotide programmable nucleotide binding domain which can be incorporated into a base editor include a CRISPR protein-derived domain, a restriction nuclease, a meganuclease, TAL nuclease (TALEN), and a zinc finger nuclease (ZFN). In some embodiments, a base editor comprises a polynucleotide programmable nucleotide binding domain comprising a natural or modified protein or portion thereof which via a bound guide nucleic acid is capable of binding to a nucleic acid sequence during CRISPR (i.e., Clustered Regularly Interspaced Short Palindromic Repeats)-mediated modification of a nucleic acid. Such a protein is referred to herein as a “CRISPR protein.” Accordingly, disclosed herein is a base editor comprising a polynucleotide programmable nucleotide binding domain comprising all or a portion of a CRISPR protein (i.e. a base editor comprising as a domain all or a portion of a CRISPR protein, also referred to as a “CRISPR protein-derived domain” of the base editor). A CRISPR protein-derived domain incorporated into a base editor can be modified compared to a wild-type or natural version of the CRISPR protein. For example, as described below a CRISPR protein-derived domain can comprise one or more mutations, insertions, deletions, rearrangements and/or recombinations relative to a wild-type or natural version of the CRISPR protein.

[0252] CRISPR is an adaptive immune system that provides protection against mobile genetic elements (viruses, transposable elements and conjugative plasmids). CRISPR clusters contain spacers, sequences complementary to antecedent mobile elements, and target invading nucleic acids. CRISPR clusters are transcribed and processed into CRISPR RNA (crRNA). In type II CRISPR systems, correct processing of pre-crRNA requires a trans-encoded small RNA (tracrRNA), endogenous ribonuclease 3 (rnc) and a Cas9 protein. The tracrRNA serves as a guide for ribonuclease 3-aided processing of pre-crRNA. Subsequently, Cas9/crRNA/tracrRNA endonucleolytically cleaves linear or circular dsDNA target complementary to the spacer. The target strand not complementary to crRNA is first cut endonucleolytically, and then trimmed 3′-5′ exonucleolytically. In nature, DNA-binding and cleavage typically requires protein and both RNAs. However, single guide RNAs (“sgRNA,” or simply “gNRA”) can be engineered so as to incorporate aspects of both the crRNA and tracrRNA into a single RNA species. See, e.g., Jinek M., Chylinski K., Fonfara I., Hauer M., Doudna J. A., Charpentier E. Science 337:816-821 (2012), the entire contents of which is hereby incorporated by reference. Cas9 recognizes a short motif in the CRISPR repeat sequences (the PAM or protospacer adjacent motif) to help distinguish self versus non-self.

[0253] In some embodiments, the methods described herein can utilize an engineered Cas protein. A guide RNA (gRNA) is a short synthetic RNA composed of a scaffold sequence necessary for Cas-binding and a user-defined ˜20 nucleotide spacer that defines the genomic target to be modified. Thus, a skilled artisan can change the genomic target of the Cas protein specificity is partially determined by how specific the gRNA targeting sequence is for the genomic target compared to the rest of the genome.

[0254] In some embodiments, the gRNA scaffold sequence is as follows: GUUUUAGAGC UAGAAAUAGC AAGUUAAAAU AAGGCUAGUC CGUUAUCAAC UUGAAAAAGU GGCACCGAGU CGGUGCUUUU (SEQ ID NO: 78).

[0255] In some embodiments, a CRISPR protein-derived domain incorporated into a base editor is an endonuclease (e.g., deoxyribonuclease or ribonuclease) capable of binding a target polynucleotide when in conjunction with a bound guide nucleic acid. In some embodiments, a CRISPR protein-derived domain incorporated into a base editor is a nickase capable of binding a target polynucleotide when in conjunction with a bound guide nucleic acid. In some embodiments, a CRISPR protein-derived domain incorporated into a base editor is a catalytically dead domain capable of binding a target polynucleotide when in conjunction with a bound guide nucleic acid. In some embodiments, a target polynucleotide bound by a CRISPR protein derived domain of a base editor is DNA. In some embodiments, a target polynucleotide bound by a CRISPR protein-derived domain of a base editor is RNA.

[0256] Cas proteins that can be used herein include class 1 and class 2. Non-limiting examples of Cas proteins include Cas1, Cas1B, Cas2, Cas3, Cas4, Cas5, Cas5d, Cas5t, Cas5h, Cas5a, Cas6, Cas7, Cas8, Cas9 (also known as Csn1 or Csx12), Cas10, Csy1, Csy2, Csy3, Csy4, Cse1, Cse2, Cse3, Cse4, Cse5e, Csc1, Csc2, Csa5, Csn1, Csn2, Csm1, Csm2, Csm3, Csm4, Csm5, Csm6, Cmr1, Cmr3, Cmr4, Cmr5, Cmr6, Csb1, Csb2, Csb3, Csx17, Csx14, Csx10, Csx16, CsaX, Csx3, Csx1, Csx1S, Csf1, Csf2, CsO, Csf4, Csd1, Csd2, Cst1, Cst2, Csh1, Csh2, Csa1, Csa2, Csa3, Csa4, Csa5, Cas12a/Cpf1, Cas12b/C2c1, Cas12c/C2c3, Cas12d/CasY, Cas12e/CasX, Cas12g, Cas12h, and Cas12i, CARF, DinG, homologues thereof, or modified versions thereof. An unmodified CRISPR enzyme can have DNA cleavage activity, such as Cas9, which has two functional endonuclease domains: RuvC and HNH. A CRISPR enzyme can direct cleavage of one or both strands at a target sequence, such as within a target sequence and/or within a complement of a target sequence. For example, a CRISPR enzyme can direct cleavage of one or both strands within about 1, 2, 3, 4, 5, 6, 7, 8, 9, 10, 15, 20, 25, 50, 100, 200, 500, or more base pairs from the first or last nucleotide of a target sequence.

[0257] A vector that encodes a CRISPR enzyme that is mutated to with respect, to a corresponding wild-type enzyme such that the mutated CRISPR enzyme lacks the ability to cleave one or both strands of a target polynucleotide containing a target sequence can be used. Cas9 can refer to a polypeptide with at least or at least about 50%, 60%, 70%, 80%, 90%, 91%, 92%, 93%, 94%, 95%, 96%, 97%, 98%, 99%, or 100% sequence identity and/or sequence homology to a wild type exemplary Cas9 polypeptide (e.g., Cas9 from S. pyogenes). Cas9 can refer to a polypeptide with at most or at most about 50%, 60%, 70%, 80%, 90%, 91%, 92%, 93%, 94%, 95%, 96%, 97%, 98%, 99%, or 100% sequence identity and/or sequence homology to a wild type exemplary Cas9 polypeptide (e.g., from S. pyogenes). Cas9 can refer to the wild-type or a modified form of the Cas9 protein that can comprise an amino acid change such as a deletion, insertion, substitution, variant, mutation, fusion, chimera, or any combination thereof.

[0258] In some embodiments, a CRISPR protein-derived domain of a base editor can include all or a portion of Cas9 from Corynebacterium ulcerans (NCBI Refs: NC_015683.1, NC_017317.1); Corynebacterium diphtheria (NCBI Refs: NC_016782.1, NC_016786.1); Spiroplasma syrphidicola (NCBI Ref: NC_021284.1); Prevotella intermedia (NCBI Ref: NC_017861.1); Spiroplasma taiwanense (NCBI Ref: NC_021846.1); Streptococcus iniae (NCBI Ref: NC_021314.1); Belliella baltica (NCBI Ref: NC_018010.1); Psychroflexus torquis (NCBI Ref: NC_018721.1); Streptococcus thermophilus (NCBI Ref: YP_820832.1); Listeria innocua (NCBI Ref: NP_472073.1); Campylobacter jejuni (NCBI Ref: YP_002344900.1); Neisseria meningitidis (NCBI Ref: YP_002342100.1), Streptococcus pyogenes, or Staphylococcus aureus.

### Cas9 Domains of Nucleobase Editors

[0259] Cas9 nuclease sequences and structures are well known to those of skill in the art (See, e.g., “Complete genome sequence of an M1 strain of Streptococcus pyogenes.” Ferretti et al., J. J., McShan W. M., Ajdic D. J., Savic D. J., Savic G., Lyon K., Primeaux C, Sezate S., Suvorov A N., Kenton S., Lai H. S., Lin S. P., Qian Y., Jia H. G., Najar F. Z., Ren Q., Zhu H., Song L., White J., Yuan X., Clifton S. W., Roe B. A., McLaughlin R. E., Proc. Natl. Acad. Sci. U.S.A. 98:4658-4663 (2001); “CRISPR RNA maturation by trans-encoded small RNA and host factor RNase III.” Deltcheva E., Chylinski K., Sharma C. M., Gonzales K., Chao Y., Pirzada Z. A., Eckert M. R., Vogel J., Charpentier E., Nature 471:602-607 (2011); and “A programmable dual-RNA-guided DNA endonuclease in adaptive bacterial immunity.” Jinek M., Chylinski K., Fonfara I., Hauer M., Doudna J. A., Charpentier E. Science 337:816-821 (2012), the entire contents of each of which are incorporated herein by reference). Cas9 orthologs have been described in various species, including, but not limited to, S. pyogenes and S. thermophilus. Additional suitable Cas9 nucleases and sequences will be apparent to those of skill in the art based on this disclosure, and such Cas9 nucleases and sequences include Cas9 sequences from the organisms and loci disclosed in Chylinski, Rhun, and Charpentier, “The tracrRNA and Cas9 families of type II CRISPR-Cas immunity systems” (2013) RNA Biology 10:5, 726-737; the entire contents of which are incorporated herein by reference.

[0260] In some embodiments, a nucleic acid programmable DNA binding protein (napDNAbp) is a Cas9 domain. Non-limiting, exemplary Cas9 domains are provided herein. The Cas9 domain may be a nuclease active Cas9 domain, a nuclease inactive Cas9 domain (dCas9), or a Cas9 nickase (nCas9). In some embodiments, the Cas9 domain is a nuclease active domain. For example, the Cas9 domain may be a Cas9 domain that cuts both strands of a duplexed nucleic acid (e.g., both strands of a duplexed DNA molecule). In some embodiments, the Cas9 domain comprises any one of the amino acid sequences as set forth herein. In some embodiments the Cas9 domain comprises an amino acid sequence that is at least 60%, at least 65%, at least 70%, at least 75%, at least 80%, at least 85%, at least 90%, at least 95%, at least 96%, at least 97%, at least 98%, at least 99%, or at least 99.5% identical to any one of the amino acid sequences set forth herein. In some embodiments, the Cas9 domain comprises an amino acid sequence that has 1, 2, 3, 4, 5, 6, 7, 8, 9, 10, 11, 12, 13, 14, 15, 16, 17, 18, 19, 20, 21, 22, 21, 24, 25, 26, 27, 28, 29, 30, 31, 32, 33, 34, 35, 36, 37, 38, 39, 40, 41, 42, 43, 44, 45, 46, 47, 48, 49, 50 or more or more mutations compared to any one of the amino acid sequences set forth herein. In some embodiments, the Cas9 domain comprises an amino acid sequence that has at least 10, at least 15, at least 20, at least 30, at least 40, at least 50, at least 60, at least 70, at least 80, at least 90, at least 100, at least 150, at least 200, at least 250, at least 300, at least 350, at least 400, at least 500, at least 600, at least 700, at least 800, at least 900, at least 1000, at least 1100, or at least 1200 identical contiguous amino acid residues as compared to any one of the amino acid sequences set forth herein.

[0261] In some embodiments, proteins comprising fragments of Cas9 are provided. For example, in some embodiments, a protein comprises one of two Cas9 domains: (1) the gRNA binding domain of Cas9; or (2) the DNA cleavage domain of Cas9. In some embodiments, proteins comprising Cas9 or fragments thereof are referred to as “Cas9 variants.” A Cas9 variant shares homology to Cas9, or a fragment thereof. For example, a Cas9 variant is at least about 70% identical, at least about 80% identical, at least about 90% identical, at least about 95% identical, at least about 96% identical, at least about 97% identical, at least about 98% identical, at least about 99% identical, at least about 99.5% identical, or at least about 99.9% identical to wild-type Cas9. In some embodiments, the Cas9 variant may have 1, 2, 3, 4, 5, 6, 7, 8, 9, 10, 11, 12, 13, 14, 15, 16, 17, 18, 19, 20, 21, 22, 21, 24, 25, 26, 27, 28, 29, 30, 31, 32, 33, 34, 35, 36, 37, 38, 39, 40, 41, 42, 43, 44, 45, 46, 47, 48, 49, 50 or more amino acid changes compared to wild-type Cas9. In some embodiments, the Cas9 variant comprises a fragment of Cas9 (e.g., a gRNA binding domain or a DNA-cleavage domain), such that the fragment is at least about 70% identical, at least about 80% identical, at least about 90% identical, at least about 95% identical, at least about 96% identical, at least about 97% identical, at least about 98% identical, at least about 99% identical, at least about 99.5% identical, or at least about 99.9% identical to the corresponding fragment of wild-type Cas9. In some embodiments, the fragment is at least 30%, at least 35%, at least 40%, at least 45%, at least 50%, at least 55%, at least 60%, at least 65%, at least 70%, at least 75%, at least 80%, at least 85%, at least 90%, at least 95% identical, at least 96%, at least 97%, at least 98%, at least 99%, or at least 99.5% of the amino acid length of a corresponding wild-type Cas9. In some embodiments, the fragment is at least 100 amino acids in length. In some embodiments, the fragment is at least 100, 150, 200, 250, 300, 350, 400, 450, 500, 550, 600, 650, 700, 750, 800, 850, 900, 950, 1000, 1050, 1100, 1150, 1200, 1250, or at least 1300 amino acids in length.

[0262] In some embodiments, Cas9 fusion proteins as provided herein comprise the full-length amino acid sequence of a Cas9 protein, e.g., one of the Cas9 sequences provided herein. In other embodiments, however, fusion proteins as provided herein do not comprise a full-length Cas9 sequence, but only one or more fragments thereof. Exemplary amino acid sequences of suitable Cas9 domains and Cas9 fragments are provided herein, and additional suitable sequences of Cas9 domains and fragments will be apparent to those of skill in the art.

[0263] A Cas9 protein can associate with a guide RNA that guides the Cas9 protein to a specific DNA sequence that has complementary to the guide RNA. In some embodiments, the polynucleotide programmable nucleotide binding domain is a Cas9 domain, for example a nuclease active Cas9, a Cas9 nickase (nCas9), or a nuclease inactive Cas9 (dCas9). Examples of nucleic acid programmable DNA binding proteins include, without limitation, Cas9 (e.g., dCas9 and nCas9), CasX, CasY, Cpf1, Cas12b/C2C1, and Cas12c/C2C3.

[0264] In some embodiments, wild-type Cas9 corresponds to Cas9 from Streptococcus pyogenes (NCBI Reference Sequence: NC_017053.1, nucleotide and amino acid sequences as follows):

(SEQ ID NO: 29)
ATGGATAAGAAATACTCAATAGGCTTAGATATCGGCACAAATAGCGTCGGATGGGCGGTGATCACTGATG
ATTATAAGGTTCCGTCTAAAAAGTTCAAGGTTCTGGGAAATACAGACCGCCACAGTATCAAAAAAAATCT
TATAGGGGCTCTTTTATTTGGCAGTGGAGAGACAGCGGAAGCGACTCGTCTCAAACGGACAGCTCGTAGA
AGGTATACACGTCGGAAGAATCGTATTTGTTATCTACAGGAGATTTTTTCAAATGAGATGGCGAAAGTAG
ATGATAGTTTCTTTCATCGACTTGAAGAGTCTTTTTTGGTGGAAGAAGACAAGAAGCATGAACGTCATCC
TATTTTTGGAAATATAGTAGATGAAGTTGCTTATCATGAGAAATATCCAACTATCTATCATCTGCGAAAA
AAATTGGCAGATTCTACTGATAAAGCGGATTTGCGCTTAATCTATTTGGCCTTAGCGCATATGATTAAGT
TTCGTGGTCATTTTTTGATTGAGGGAGATTTAAATCCTGATAATAGTGATGTGGACAAACTATTTATCCA
GTTGGTACAAATCTACAATCAATTATTTGAAGAAAACCCTATTAACGCAAGTAGAGTAGATGCTAAAGCG
ATTCTTTCTGCACGATTGAGTAAATCAAGACGATTAGAAAATCTCATTGCTCAGCTCCCCGGTGAGAAGA
GAAATGGCTTGTTTGGGAATCTCATTGCTTTGTCATTGGGATTGACCCCTAATTTTAAATCAAATTTTGA
TTTGGCAGAAGATGCTAAATTACAGCTTTCAAAAGATACTTACGATGATGATTTAGATAATTTATTGGCG
CAAATTGGAGATCAATATGCTGATTTGTTTTTGGCAGCTAAGAATTTATCAGATGCTATTTTACTTTCAG
ATATCCTAAGAGTAAATAGTGAAATAACTAAGGCTCCCCTATCAGCTTCAATGATTAAGCGCTACGATGA
ACATCATCAAGACTTGACTCTTTTAAAAGCTTTAGTTCGACAACAACTTCCAGAAAAGTATAAAGAAATC
TTTTTTGATCAATCAAAAAACGGATATGCAGGTTATATTGATGGGGGAGCTAGCCAAGAAGAATTTTATA
AATTTATCAAACCAATTTTAGAAAAAATGGATGGTACTGAGGAATTATTGGTGAAACTAAATCGTGAAGA
TTTGCTGCGCAAGCAACGGACCTTTGACAACGGCTCTATTCCCCATCAAATTCACTTGGGTGAGCTGCAT
GCTATTTTGAGAAGACAAGAAGACTTTTATCCATTTTTAAAAGACAATCGTGAGAAGATTGAAAAAATCT
TGACTTTTCGAATTCCTTATTATGTTGGTCCATTGGCGCGTGGCAATAGTCGTTTTGCATGGATGACTCG
GAAGTCTGAAGAAACAATTACCCCATGGAATTTTGAAGAAGTTGTCGATAAAGGTGCTTCAGCTCAATCA
TTTATTGAACGCATGACAAACTTTGATAAAAATCTTCCAAATGAAAAAGTACTACCAAAACATAGTTTGC
TTTATGAGTATTTTACGGTTTATAACGAATTGACAAAGGTCAAATATGTTACTGAGGGAATGCGAAAACC
AGCATTTCTTTCAGGTGAACAGAAGAAAGCCATTGTTGATTTACTCTTCAAAACAAATCGAAAAGTAACC
GTTAAGCAATTAAAAGAAGATTATTTCAAAAAAATAGAATGTTTTGATAGTGTTGAAATTTCAGGAGTTG
AAGATAGATTTAATGCTTCATTAGGCGCCTACCATGATTTGCTAAAAATTATTAAAGATAAAGATTTTTT
GGATAATGAAGAAAATGAAGATATCTTAGAGGATATTGTTTTAACATTGACCTTATTTGAAGATAGGGGG
ATGATTGAGGAAAGACTTAAAACATATGCTCACCTCTTTGATGATAAGGTGATGAAACAGCTTAAACGTC
GCCGTTATACTGGTTGGGGACGTTTGTCTCGAAAATTGATTAATGGTATTAGGGATAAGCAATCTGGCAA
AACAATATTAGATTTTTTGAAATCAGATGGTTTTGCCAATCGCAATTTTATGCAGCTGATCCATGATGAT
AGTTTGACATTTAAAGAAGATATTCAAAAAGCACAGGTGTCTGGACAAGGCCATAGTTTACATGAACAGA
TTGCTAACTTAGCTGGCAGTCCTGCTATTAAAAAAGGTATTTTACAGACTGTAAAAATTGTTGATGAACT
GGTCAAAGTAATGGGGCATAAGCCAGAAAATATCGTTATTGAAATGGCACGTGAAAATCAGACAACTCAA
AAGGGCCAGAAAAATTCGCGAGAGCGTATGAAACGAATCGAAGAAGGTATCAAAGAATTAGGAAGTCAGA
TTCTTAAAGAGCATCCTGTTGAAAATACTCAATTGCAAAATGAAAAGCTCTATCTCTATTATCTACAAAA
TGGAAGAGACATGTATGTGGACCAAGAATTAGATATTAATCGTTTAAGTGATTATGATGTCGATCACATT
GTTCCACAAAGTTTCATTAAAGACGATTCAATAGACAATAAGGTACTAACGCGTTCTGATAAAAATCGTG
GTAAATCGGATAACGTTCCAAGTGAAGAAGTAGTCAAAAAGATGAAAAACTATTGGAGACAACTTCTAAA
CGCCAAGTTAATCACTCAACGTAAGTTTGATAATTTAACGAAAGCTGAACGTGGAGGTTTGAGTGAACTT
GATAAAGCTGGTTTTATCAAACGCCAATTGGTTGAAACTCGCCAAATCACTAAGCATGTGGCACAAATTT
TGGATAGTCGCATGAATACTAAATACGATGAAAATGATAAACTTATTCGAGAGGTTAAAGTGATTACCTT
AAAATCTAAATTAGTTTCTGACTTCCGAAAAGATTTCCAATTCTATAAAGTACGTGAGATTAACAATTAC
CATCATGCCCATGATGCGTATCTAAATGCCGTCGTTGGAACTGCTTTGATTAAGAAATATCCAAAACTTG
AATCGGAGTTTGTCTATGGTGATTATAAAGTTTATGATGTTCGTAAAATGATTGCTAAGTCTGAGCAAGA
AATAGGCAAAGCAACCGCAAAATATTTCTTTTACTCTAATATCATGAACTTCTTCAAAACAGAAATTACA
CTTGCAAATGGAGAGATTCGCAAACGCCCTCTAATCGAAACTAATGGGGAAACTGGAGAAATTGTCTGGG
ATAAAGGGCGAGATTTTGCCACAGTGCGCAAAGTATTGTCCATGCCCCAAGTCAATATTGTCAAGAAAAC
AGAAGTACAGACAGGCGGATTCTCCAAGGAGTCAATTTTACCAAAAAGAAATTCGGACAAGCTTATTGCT
CGTAAAAAAGACTGGGATCCAAAAAAATATGGTGGTTTTGATAGTCCAACGGTAGCTTATTCAGTCCTAG
TGGTTGCTAAGGTGGAAAAAGGGAAATCGAAGAAGTTAAAATCCGTTAAAGAGTTACTAGGGATCACAAT
TATGGAAAGAAGTTCCTTTGAAAAAAATCCGATTGACTTTTTAGAAGCTAAAGGATATAAGGAAGTTAAA
AAAGACTTAATCATTAAACTACCTAAATATAGTCTTTTTGAGTTAGAAAACGGTCGTAAACGGATGCTGG
CTAGTGCCGGAGAATTACAAAAAGGAAATGAGCTGGCTCTGCCAAGCAAATATGTGAATTTTTTATATTT
AGCTAGTCATTATGAAAAGTTGAAGGGTAGTCCAGAAGATAACGAACAAAAACAATTGTTTGTGGAGCAG
CATAAGCATTATTTAGATGAGATTATTGAGCAAATCAGTGAATTTTCTAAGCGTGTTATTTTAGCAGATG
CCAATTTAGATAAAGTTCTTAGTGCATATAACAAACATAGAGACAAACCAATACGTGAACAAGCAGAAAA
TATTATTCATTTATTTACGTTGACGAATCTTGGAGCTCCCGCTGCTTTTAAATATTTTGATACAACAATT
GATCGTAAACGATATACGTCTACAAAAGAAGTTTTAGATGCCACTCTTATCCATCAATCCATCACTGGTC
TTTATGAAACACGCATTGATTTGAGTCAGCTAGGAGGTGACTGA
(SEQ ID NO: 28)
MDKKYSIGLDIGTNSVGWAVITDDYKVPSKKFKVLGNTDRHSIKKNLIGALLFGSGETAEATRL
KRTARRRYTRRKNRICYLQEIFSNEMAKVDDSFFHRLEESFLVEEDKKHERHPIFGNIVDEVAY
HEKYPTIYHLRKKLADSTDKADLRLIYLALAHMIKFRGHFLIEGDLNPDNSDVDKLFIQLVQIY
NQLFEENPINASRVDAKAILSARLSKSRRLENLIAQLPGEKRNGLFGNLIALSLGLTPNFKSNF
DLAEDAKLQLSKDTYDDDLDNLLAQIGDQYADLFLAAKNLSDAILLSDILRVNSEITKAPLSAS
MIKRYDEHHQDLTLLKALVRQQLPEKYKEIFFDQSKNGYAGYIDGGASQEEFYKFIKPILEKMD
GTEELLVKLNREDLLRKQRTFDNGSIPHQIHLGELHAILRRQEDFYPFLKDNREKIEKILTFRI
PYYVGPLARGNSRFAWMTRKSEETITPWNFEEVVDKGASAQSFIERMTNFDKNLPNEKVLPKHS
LLYEYFTVYNELTKVKYVTEGMRKPAFLSGEQKKAIVDLLFKTNRKVTVKQLKEDYFKKIECFD
SVEISGVEDRFNASLGAYHDLLKIIKDKDFLDNEENEDILEDIVLTLTLFEDRGMIEERLKTYA
HLFDDKVMKQLKRRRYTGWGRLSRKLINGIRDKQSGKTILDFLKSDGFANRNFMQLIHDDSLTF
KEDIQKAQVSGQGHSLHEQIANLAGSPAIKKGILQTVKIVDELVKVMGHKPENIVIEMARENQT
TQKGQKNSRERMKRIEEGIKELGSQILKEHPVENTQLQNEKLYLYYLQNGRDMYVDQELDINRL
SDYDVDHIVPQSFIKDDSIDNKVLTRSDKNRGKSDNVPSEEVVKKMKNYWRQLLNAKLITQRKF
DNLTKAERGGLSELDKAGFIKRQLVETRQITKHVAQILDSRMNTKYDENDKLIREVKVITLKSK
LVSDFRKDFQFYKVREINNYHHAHDAYLNAVVGTALIKKYPKLESEFVYGDYKVYDVRKMIAKS
EQEIGKATAKYFFYSNIMNFFKTEITLANGEIRKRPLIETNGETGEIVWDKGRDFATVRKVLSM
PQVNIVKKTEVQTGGFSKESILPKRNSDKLIARKKDWDPKKYGGFDSPTVAYSVLVVAKVEKGK
SKKLKSVKELLGITIMERSSFEKNPIDFLEAKGYKEVKKDLIIKLPKYSLFELENGRKRMLASA
GELQKGNELALPSKYVNFLYLASHYEKLKGSPEDNEQKQLFVEQHKHYLDEIIEQISEFSKRVI
LADANLDKVLSAYNKHRDKPIREQAENIIHLFTLTNLGAPAAFKYFDTTIDRKRYTSTKEVLDA
TLIHQSITGLYETRIDLSQLGGD
(single underline: HNH domain; double underline: RuvC domain)

[0265] In some embodiments, wild-type Cas9 corresponds to, or comprises, the following nucleotide and/or amino acid sequences:

(SEQ ID NO: 30)
ATGGATAAAAAGTATTCTATTGGTTTAGACATCGGCACTAATTCCGTTGGATGGGCTGTCATAA
CCGATGAATACAAAGTACCTTCAAAGAAATTTAAGGTGTTGGGGAACACAGACCGTCATTCGAT
TAAAAAGAATCTTATCGGTGCCCTCCTATTCGATAGTGGCGAAACGGCAGAGGCGACTCGCCTG
AAACGAACCGCTCGGAGAAGGTATACACGTCGCAAGAACCGAATATGTTACTTACAAGAAATTT
TTAGCAATGAGATGGCCAAAGTTGACGATTCTTTCTTTCACCGTTTGGAAGAGTCCTTCCTTGT
CGAAGAGGACAAGAAACATGAACGGCACCCCATCTTTGGAAACATAGTAGATGAGGTGGCATAT
CATGAAAAGTACCCAACGATTTATCACCTCAGAAAAAAGCTAGTTGACTCAACTGATAAAGCGG
ACCTGAGGTTAATCTACTTGGCTCTTGCCCATATGATAAAGTTCCGTGGGCACTTTCTCATTGA
GGGTGATCTAAATCCGGACAACTCGGATGTCGACAAACTGTTCATCCAGTTAGTACAAACCTAT
AATCAGTTGTTTGAAGAGAACCCTATAAATGCAAGTGGCGTGGATGCGAAGGCTATTCTTAGCG
CCCGCCTCTCTAAATCCCGACGGCTAGAAAACCTGATCGCACAATTACCCGGAGAGAAGAAAAA
TGGGTTGTTCGGTAACCTTATAGCGCTCTCACTAGGCCTGACACCAAATTTTAAGTCGAACTTC
GACTTAGCTGAAGATGCCAAATTGCAGCTTAGTAAGGACACGTACGATGACGATCTCGACAATC
TACTGGCACAAATTGGAGATCAGTATGCGGACTTATTTTTGGCTGCCAAAAACCTTAGCGATGC
AATCCTCCTATCTGACATACTGAGAGTTAATACTGAGATTACCAAGGCGCCGTTATCCGCTTCA
ATGATCAAAAGGTACGATGAACATCACCAAGACTTGACACTTCTCAAGGCCCTAGTCCGTCAGC
AACTGCCTGAGAAATATAAGGAAATATTCTTTGATCAGTCGAAAAACGGGTACGCAGGTTATAT
TGACGGCGGAGCGAGTCAAGAGGAATTCTACAAGTTTATCAAACCCATATTAGAGAAGATGGAT
GGGACGGAAGAGTTGCTTGTAAAACTCAATCGCGAAGATCTACTGCGAAAGCAGCGGACTTTCG
ACAACGGTAGCATTCCACATCAAATCCACTTAGGCGAATTGCATGCTATACTTAGAAGGCAGGA
GGATTTTTATCCGTTCCTCAAAGACAATCGTGAAAAGATTGAGAAAATCCTAACCTTTCGCATA
CCTTACTATGTGGGACCCCTGGCCCGAGGGAACTCTCGGTTCGCATGGATGACAAGAAAGTCCG
AAGAAACGATTACTCCATGGAATTTTGAGGAAGTTGTCGATAAAGGTGCGTCAGCTCAATCGTT
CATCGAGAGGATGACCAACTTTGACAAGAATTTACCGAACGAAAAAGTATTGCCTAAGCACAGT
TTACTTTACGAGTATTTCACAGTGTACAATGAACTCACGAAAGTTAAGTATGTCACTGAGGGCA
TGCGTAAACCCGCCTTTCTAAGCGGAGAACAGAAGAAAGCAATAGTAGATCTGTTATTCAAGAC
CAACCGCAAAGTGACAGTTAAGCAATTGAAAGAGGACTACTTTAAGAAAATTGAATGCTTCGAT
TCTGTCGAGATCTCCGGGGTAGAAGATCGATTTAATGCGTCACTTGGTACGTATCATGACCTCC
TAAAGATAATTAAAGATAAGGACTTCCTGGATAACGAAGAGAATGAAGATATCTTAGAAGATAT
AGTGTTGACTCTTACCCTCTTTGAAGATCGGGAAATGATTGAGGAAAGACTAAAAACATACGCT
CACCTGTTCGACGATAAGGTTATGAAACAGTTAAAGAGGCGTCGCTATACGGGCTGGGGACGAT
TGTCGCGGAAACTTATCAACGGGATAAGAGACAAGCAAAGTGGTAAAACTATTCTCGATTTTCT
AAAGAGCGACGGCTTCGCCAATAGGAACTTTATGCAGCTGATCCATGATGACTCTTTAACCTTC
AAAGAGGATATACAAAAGGCACAGGTTTCCGGACAAGGGGACTCATTGCACGAACATATTGCGA
ATCTTGCTGGTTCGCCAGCCATCAAAAAGGGCATACTCCAGACAGTCAAAGTAGTGGATGAGCT
AGTTAAGGTCATGGGACGTCACAAACCGGAAAACATTGTAATCGAGATGGCACGCGAAAATCAA
ACGACTCAGAAGGGGCAAAAAAACAGTCGAGAGCGGATGAAGAGAATAGAAGAGGGTATTAAAG
AACTGGGCAGCCAGATCTTAAAGGAGCATCCTGTGGAAAATACCCAATTGCAGAACGAGAAACT
TTACCTCTATTACCTACAAAATGGAAGGGACATGTATGTTGATCAGGAACTGGACATAAACCGT
TTATCTGATTACGACGTCGATCACATTGTACCCCAATCCTTTTTGAAGGACGATTCAATCGACA
ATAAAGTGCTTACACGCTCGGATAAGAACCGAGGGAAAAGTGACAATGTTCCAAGCGAGGAAGT
CGTAAAGAAAATGAAGAACTATTGGCGGCAGCTCCTAAATGCGAAACTGATAACGCAAAGAAAG
TTCGATAACTTAACTAAAGCTGAGAGGGGTGGCTTGTCTGAACTTGACAAGGCCGGATTTATTA
AACGTCAGCTCGTGGAAACCCGCCAAATCACAAAGCATGTTGCACAGATACTAGATTCCCGAAT
GAATACGAAATACGACGAGAACGATAAGCTGATTCGGGAAGTCAAAGTAATCACTTTAAAGTCA
AAATTGGTGTCGGACTTCAGAAAGGATTTTCAATTCTATAAAGTTAGGGAGATAAATAACTACC
ACCATGCGCACGACGCTTATCTTAATGCCGTCGTAGGGACCGCACTCATTAAGAAATACCCGAA
GCTAGAAAGTGAGTTTGTGTATGGTGATTACAAAGTTTATGACGTCCGTAAGATGATCGCGAAA
AGCGAACAGGAGATAGGCAAGGCTACAGCCAAATACTTCTTTTATTCTAACATTATGAATTTCT
TTAAGACGGAAATCACTCTGGCAAACGGAGAGATACGCAAACGACCTTTAATTGAAACCAATGG
GGAGACAGGTGAAATCGTATGGGATAAGGGCCGGGACTTCGCGACGGTGAGAAAAGTTTTGTCC
ATGCCCCAAGTCAACATAGTAAAGAAAACTGAGGTGCAGACCGGAGGGTTTTCAAAGGAATCGA
TTCTTCCAAAAAGGAATAGTGATAAGCTCATCGCTCGTAAAAAGGACTGGGACCCGAAAAAGTA
CGGTGGCTTCGATAGCCCTACAGTTGCCTATTCTGTCCTAGTAGTGGCAAAAGTTGAGAAGGGA
AAATCCAAGAAACTGAAGTCAGTCAAAGAATTATTGGGGATAACGATTATGGAGCGCTCGTCTT
TTGAAAAGAACCCCATCGACTTCCTTGAGGCGAAAGGTTACAAGGAAGTAAAAAAGGATCTCAT
AATTAAACTACCAAAGTATAGTCTGTTTGAGTTAGAAAATGGCCGAAAACGGATGTTGGCTAGC
GCCGGAGAGCTTCAAAAGGGGAACGAACTCGCACTACCGTCTAAATACGTGAATTTCCTGTATT
TAGCGTCCCATTACGAGAAGTTGAAAGGTTCACCTGAAGATAACGAACAGAAGCAACTTTTTGT
TGAGCAGCACAAACATTATCTCGACGAAATCATAGAGCAAATTTCGGAATTCAGTAAGAGAGTC
ATCCTAGCTGATGCCAATCTGGACAAAGTATTAAGCGCATACAACAAGCACAGGGATAAACCCA
TACGTGAGCAGGCGGAAAATATTATCCATTTGTTTACTCTTACCAACCTCGGCGCTCCAGCCGC
ATTCAAGTATTTTGACACAACGATAGATCGCAAACGATACACTTCTACCAAGGAGGTGCTAGAC
GCGACACTGATTCACCAATCCATCACGGGATTATATGAAACTCGGATAGATTTGTCACAGCTTG
GGGGTGACGGATCCCCCAAGAAGAAGAGGAAAGTCTCGAGCGACTACAAAGACCATGACGGTGA
TTATAAAGATCATGACATCGATTACAAGGATGACGATGACAAGGCTGCAGGA
(SEQ ID NO: 31)
MDKKYSIGLAIGTNSVGWAVITDEYKVPSKKFKVLGNTDRHSIKKNLIGALLFDSGETAEATRL
KRTARRRYTRRKNRICYLQEIFSNEMAKVDDSFFHRLEESFLVEEDKKHERHPIFGNIVDEVAY
HEKYPTIYHLRKKLVDSTDKADLRLIYLALAHMIKFRGHFLIEGDLNPDNSDVDKLFIQLVQTY
NQLFEENPINASGVDAKAILSARLSKSRRLENLIAQLPGEKKNGLFGNLIALSLGLTPNFKSNF
DLAEDAKLQLSKDTYDDDLDNLLAQIGDQYADLFLAAKNLSDAILLSDILRVNTEITKAPLSAS
MIKRYDEHHQDLTLLKALVRQQLPEKYKEIFFDQSKNGYAGYIDGGASQEEFYKFIKPILEKMD
GTEELLVKLNREDLLRKQRTFDNGSIPHQIHLGELHAILRRQEDFYPFLKDNREKIEKILTFRI
PYYVGPLARGNSRFAWMTRKSEETITPWNFEEVVDKGASAQSFIERMTNFDKNLPNEKVLPKHS
LLYEYFTVYNELTKVKYVTEGMRKPAFLSGEQKKAIVDLLFKTNRKVTVKQLKEDYFKKIECFD
SVEISGVEDRFNASLGTYHDLLKIIKDKDFLDNEENEDILEDIVLTLTLFEDREMIEERLKTYA
HLFDDKVMKQLKRRRYTGWGRLSRKLINGIRDKQSGKTILDFLKSDGFANRNFMQLIHDDSLTF
KEDIQKAQVSGQGDSLHEHIANLAGSPAIKKGILQTVKVVDELVKVMGRHKPENIVIEMARENQ
TTQKGQKNSRERMKRIEEGIKELGSQILKEHPVENTQLQNEKLYLYYLQNGRDMYVDQELDINR
LSDYDVDHIVPQSFLKDDSIDNKVLTRSDKNRGKSDNVPSEEVVKKMKNYWRQLLNAKLITQRK
FDNLTKAERGGLSELDKAGFIKRQLVETRQITKHVAQILDSRMNTKYDENDKLIREVKVITLKS
KLVSDFRKDFQFYKVREINNYHHAHDAYLNAVVGTALIKKYPKLESEFVYGDYKVYDVRKMIAK
SEQEIGKATAKYFFYSNIMNFFKTEITLANGEIRKRPLIETNGETGEIVWDKGRDFATVRKVLS
MPQVNIVKKTEVQTGGFSKESILPKRNSDKLIARKKDWDPKKYGGFDSPTVAYSVLVVAKVEKG
KSKKLKSVKELLGITIMERSSFEKNPIDFLEAKGYKEVKKDLIIKLPKYSLFELENGRKRMLAS
AGELQKGNELALPSKYVNFLYLASHYEKLKGSPEDNEQKQLFVEQHKHYLDEIIEQISEFSKRV
ILADANLDKVLSAYNKHRDKPIREQAENIIHLFTLTNLGAPAAFKYFDTTIDRKRYTSTKEVLD
ATLIHQSITGLYETRIDLSQLGGD
(single underline: HNH domain; double underline: RuvC domain)

[0266] In some embodiments, wild-type Cas9 corresponds to Cas9 from Streptococcus pyogenes (NCBI Reference Sequence: NC_002737.2 (nucleotide sequence as follows); and Uniprot Reference Sequence: Q99ZW2 (amino acid sequence as follows):

(SEQ ID NO: 32)
ATGGATAAGAAATACTCAATAGGCTTAGATATCGGCACAAATAGCGTCGGATGGGCGGTGATCA
CTGATGAATATAAGGTTCCGTCTAAAAAGTTCAAGGTTCTGGGAAATACAGACCGCCACAGTAT
CAAAAAAAATCTTATAGGGGCTCTTTTATTTGACAGTGGAGAGACAGCGGAAGCGACTCGTCTC
AAACGGACAGCTCGTAGAAGGTATACACGTCGGAAGAATCGTATTTGTTATCTACAGGAGATTT
TTTCAAATGAGATGGCGAAAGTAGATGATAGTTTCTTTCATCGACTTGAAGAGTCTTTTTTGGT
GGAAGAAGACAAGAAGCATGAACGTCATCCTATTTTTGGAAATATAGTAGATGAAGTTGCTTAT
CATGAGAAATATCCAACTATCTATCATCTGCGAAAAAAATTGGTAGATTCTACTGATAAAGCGG
ATTTGCGCTTAATCTATTTGGCCTTAGCGCATATGATTAAGTTTCGTGGTCATTTTTTGATTGA
GGGAGATTTAAATCCTGATAATAGTGATGTGGACAAACTATTTATCCAGTTGGTACAAACCTAC
AATCAATTATTTGAAGAAAACCCTATTAACGCAAGTGGAGTAGATGCTAAAGCGATTCTTTCTG
CACGATTGAGTAAATCAAGACGATTAGAAAATCTCATTGCTCAGCTCCCCGGTGAGAAGAAAAA
TGGCTTATTTGGGAATCTCATTGCTTTGTCATTGGGTTTGACCCCTAATTTTAAATCAAATTTT
GATTTGGCAGAAGATGCTAAATTACAGCTTTCAAAAGATACTTACGATGATGATTTAGATAATT
TATTGGCGCAAATTGGAGATCAATATGCTGATTTGTTTTTGGCAGCTAAGAATTTATCAGATGC
TATTTTACTTTCAGATATCCTAAGAGTAAATACTGAAATAACTAAGGCTCCCCTATCAGCTTCA
ATGATTAAACGCTACGATGAACATCATCAAGACTTGACTCTTTTAAAAGCTTTAGTTCGACAAC
AACTTCCAGAAAAGTATAAAGAAATCTTTTTTGATCAATCAAAAAACGGATATGCAGGTTATAT
TGATGGGGGAGCTAGCCAAGAAGAATTTTATAAATTTATCAAACCAATTTTAGAAAAAATGGAT
GGTACTGAGGAATTATTGGTGAAACTAAATCGTGAAGATTTGCTGCGCAAGCAACGGACCTTTG
ACAACGGCTCTATTCCCCATCAAATTCACTTGGGTGAGCTGCATGCTATTTTGAGAAGACAAGA
AGACTTTTATCCATTTTTAAAAGACAATCGTGAGAAGATTGAAAAAATCTTGACTTTTCGAATT
CCTTATTATGTTGGTCCATTGGCGCGTGGCAATAGTCGTTTTGCATGGATGACTCGGAAGTCTG
AAGAAACAATTACCCCATGGAATTTTGAAGAAGTTGTCGATAAAGGTGCTTCAGCTCAATCATT
TATTGAACGCATGACAAACTTTGATAAAAATCTTCCAAATGAAAAAGTACTACCAAAACATAGT
TTGCTTTATGAGTATTTTACGGTTTATAACGAATTGACAAAGGTCAAATATGTTACTGAAGGAA
TGCGAAAACCAGCATTTCTTTCAGGTGAACAGAAGAAAGCCATTGTTGATTTACTCTTCAAAAC
AAATCGAAAAGTAACCGTTAAGCAATTAAAAGAAGATTATTTCAAAAAAATAGAATGTTTTGAT
AGTGTTGAAATTTCAGGAGTTGAAGATAGATTTAATGCTTCATTAGGTACCTACCATGATTTGC
TAAAAATTATTAAAGATAAAGATTTTTTGGATAATGAAGAAAATGAAGATATCTTAGAGGATAT
TGTTTTAACATTGACCTTATTTGAAGATAGGGAGATGATTGAGGAAAGACTTAAAACATATGCT
CACCTCTTTGATGATAAGGTGATGAAACAGCTTAAACGTCGCCGTTATACTGGTTGGGGACGTT
TGTCTCGAAAATTGATTAATGGTATTAGGGATAAGCAATCTGGCAAAACAATATTAGATTTTTT
GAAATCAGATGGTTTTGCCAATCGCAATTTTATGCAGCTGATCCATGATGATAGTTTGACATTT
AAAGAAGACATTCAAAAAGCACAAGTGTCTGGACAAGGCGATAGTTTACATGAACATATTGCAA
ATTTAGCTGGTAGCCCTGCTATTAAAAAAGGTATTTTACAGACTGTAAAAGTTGTTGATGAATT
GGTCAAAGTAATGGGGCGGCATAAGCCAGAAAATATCGTTATTGAAATGGCACGTGAAAATCAG
ACAACTCAAAAGGGCCAGAAAAATTCGCGAGAGCGTATGAAACGAATCGAAGAAGGTATCAAAG
AATTAGGAAGTCAGATTCTTAAAGAGCATCCTGTTGAAAATACTCAATTGCAAAATGAAAAGCT
CTATCTCTATTATCTCCAAAATGGAAGAGACATGTATGTGGACCAAGAATTAGATATTAATCGT
TTAAGTGATTATGATGTCGATCACATTGTTCCACAAAGTTTCCTTAAAGACGATTCAATAGACA
ATAAGGTCTTAACGCGTTCTGATAAAAATCGTGGTAAATCGGATAACGTTCCAAGTGAAGAAGT
AGTCAAAAAGATGAAAAACTATTGGAGACAACTTCTAAACGCCAAGTTAATCACTCAACGTAAG
TTTGATAATTTAACGAAAGCTGAACGTGGAGGTTTGAGTGAACTTGATAAAGCTGGTTTTATCA
AACGCCAATTGGTTGAAACTCGCCAAATCACTAAGCATGTGGCACAAATTTTGGATAGTCGCAT
GAATACTAAATACGATGAAAATGATAAACTTATTCGAGAGGTTAAAGTGATTACCTTAAAATCT
AAATTAGTTTCTGACTTCCGAAAAGATTTCCAATTCTATAAAGTACGTGAGATTAACAATTACC
ATCATGCCCATGATGCGTATCTAAATGCCGTCGTTGGAACTGCTTTGATTAAGAAATATCCAAA
ACTTGAATCGGAGTTTGTCTATGGTGATTATAAAGTTTATGATGTTCGTAAAATGATTGCTAAG
TCTGAGCAAGAAATAGGCAAAGCAACCGCAAAATATTTCTTTTACTCTAATATCATGAACTTCT
TCAAAACAGAAATTACACTTGCAAATGGAGAGATTCGCAAACGCCCTCTAATCGAAACTAATGG
GGAAACTGGAGAAATTGTCTGGGATAAAGGGCGAGATTTTGCCACAGTGCGCAAAGTATTGTCC
ATGCCCCAAGTCAATATTGTCAAGAAAACAGAAGTACAGACAGGCGGATTCTCCAAGGAGTCAA
TTTTACCAAAAAGAAATTCGGACAAGCTTATTGCTCGTAAAAAAGACTGGGATCCAAAAAAATA
TGGTGGTTTTGATAGTCCAACGGTAGCTTATTCAGTCCTAGTGGTTGCTAAGGTGGAAAAAGGG
AAATCGAAGAAGTTAAAATCCGTTAAAGAGTTACTAGGGATCACAATTATGGAAAGAAGTTCCT
TTGAAAAAAATCCGATTGACTTTTTAGAAGCTAAAGGATATAAGGAAGTTAAAAAAGACTTAAT
CATTAAACTACCTAAATATAGTCTTTTTGAGTTAGAAAACGGTCGTAAACGGATGCTGGCTAGT
GCCGGAGAATTACAAAAAGGAAATGAGCTGGCTCTGCCAAGCAAATATGTGAATTTTTTATATT
TAGCTAGTCATTATGAAAAGTTGAAGGGTAGTCCAGAAGATAACGAACAAAAACAATTGTTTGT
GGAGCAGCATAAGCATTATTTAGATGAGATTATTGAGCAAATCAGTGAATTTTCTAAGCGTGTT
ATTTTAGCAGATGCCAATTTAGATAAAGTTCTTAGTGCATATAACAAACATAGAGACAAACCAA
TACGTGAACAAGCAGAAAATATTATTCATTTATTTACGTTGACGAATCTTGGAGCTCCCGCTGC
TTTTAAATATTTTGATACAACAATTGATCGTAAACGATATACGTCTACAAAAGAAGTTTTAGAT
GCCACTCTTATCCATCAATCCATCACTGGTCTTTATGAAACACGCATTGATTTGAGTCAGCTAG
GAGGTGACTGA
(SEQ ID NO: 1)
MDKKYSIGLDIGINSVGWAVITDEYKVPSKKFKVLGNIDRHSIKKNLIGALLFDSGETAEATRL
KRTARRRYTRRKNRICYLQEIFSNEMAKVDDSFFHRLEESFLVEEDKKHERHPIFGNIVDEVAY
HEKYPTIYHLRKKLVDSTDKADLRLIYLALAHMIKFRGHFLIEGDLNPDNSDVDKLFIQLVQTY
NQLFEENPINASGVDAKAILSARLSKSRRLENLIAQLPGEKKNGLFGNLIALSLGLTPNFKSNF
DLAEDAKLQLSKDTYDDDLDNLLAQIGDQYADLFLAAKNLSDAILLSDILRVNTEITKAPLSAS
MIKRYDEHHQDLTLLKALVRQQLPEKYKEIFFDQSKNGYAGYIDGGASQEEFYKFIKPILEKMD
GTEELLVKLNREDLLRKQRTFDNGSIPHQIHLGELHAILRRQEDFYPFLKDNREKIEKILTFRI
PYYVGPLARGNSRFAWMTRKSEETITPWNFEEVVDKGASAQSFIERMTNFDKNLPNEKVLPKHS
LLYEYFTVYNELTKVKYVTEGMRKPAFLSGEQKKAIVDLLFKTNRKVTVKQLKEDYFKKIECFD
SVEISGVEDRFNASLGTYHDLLKIIKDKDFLDNEENEDILEDIVLTLTLFEDREMIEERLKTYA
HLFDDKVMKQLKRRRYTGWGRLSRKLINGIRDKQSGKTILDFLKSDGFANRNFMQLIHDDSLTF
KEDIQKAQVSGQGDSLHEHIANLAGSPAIKKGILQTVKVVDELVKVMGRHKPENIVIEMARENQ
TTQKGQKNSRERMKRIEEGIKELGSQILKEHPVENTQLQNEKLYLYYLQNGRDMYVDQELDINR
LSDYDVDHIVPQSFLKDDSIDNKVLTRSDKNRGKSDNVPSEEVVKKMKNYWRQLLNAKLITQRK
FDNLTKAERGGLSELDKAGFIKRQLVETRQITKHVAQILDSRMNTKYDENDKLIREVKVITLKS
KLVSDFRKDFQFYKVREINNYHHAHDAYLNAVVGTALIKKYPKLESEFVYGDYKVYDVRKMIAK
SEQEIGKATAKYFFYSNIMNFFKTEITLANGEIRKRPLIETNGETGEIVWDKGRDFATVRKVLS
MPQVNIVKKTEVQTGGFSKESILPKRNSDKLIARKKDWDPKKYGGFDSPTVAYSVLVVAKVEKG
KSKKLKSVKELLGITIMERSSFEKNPIDFLEAKGYKEVKKDLIIKLPKYSLFELENGRKRMLAS
AGELQKGNELALPSKYVNFLYLASHYEKLKGSPEDNEQKQLFVEQHKHYLDEIIEQISEFSKRV
ILADANLDKVLSAYNKHRDKPIREQAENIIHLFTLTNLGAPAAFKYFDTTIDRKRYTSTKEVLD
ATLIHQSITGLYETRIDLSQLGGD
(single underline: HNH domain; double underline: RuvC domain)

[0267] In some embodiments, Cas9 refers to Cas9 from: Corynebacterium ulcerans (NCBI Refs: NC_015683.1, NC_017317.1); Corynebacterium diphtheria (NCBI Refs: NC_016782.1, NC_016786.1); Spiroplasma syrphidicola (NCBI Ref: NC_021284.1); Prevotella intermedia (NCBI Ref: NC_017861.1); Spiroplasma taiwanense (NCBI Ref: NC_021846.1); Streptococcus iniae (NCBI Ref: NC_021314.1); Belliella baltica (NCBI Ref: NC_018010.1); Psychroflexus torquisl (NCBI Ref: NC_018721.1); Streptococcus thermophilus (NCBI Ref: YP_820832.1), Listeria innocua (NCBI Ref: NP_472073.1), Campylobacter jejuni (NCBI Ref: YP_002344900.1) or Neisseria. meningitidis (NCBI Ref: YP_002342100.1) or to a Cas9 from any other organism.

[0268] It should be appreciated that additional Cas9 proteins (e.g., a nuclease dead Cas9 (dCas9), a Cas9 nickase (nCas9), or a nuclease active Cas9), including variants and homologs thereof, are within the scope of this disclosure. Exemplary Cas9 proteins include, without limitation, those provided below. In some embodiments, the Cas9 protein is a nuclease dead Cas9 (dCas9). In some embodiments, the Cas9 protein is a Cas9 nickase (nCas9). In some embodiments, the Cas9 protein is a nuclease active Cas9.

[0269] In some embodiments, the Cas9 domain is a nuclease-inactive Cas9 domain (dCas9). For example, the dCas9 domain may bind to a duplexed nucleic acid molecule (e.g., via a gRNA molecule) without cleaving either strand of the duplexed nucleic acid molecule. In some embodiments, the nuclease-inactive dCas9 domain comprises a D10X mutation and a H840X mutation of the amino acid sequence set forth herein, or a corresponding mutation in any of the amino acid sequences provided herein, wherein X is any amino acid change. In some embodiments, the nuclease-inactive dCas9 domain comprises a D10A mutation and a H840A mutation of the amino acid sequence set forth herein, or a corresponding mutation in any of the amino acid sequences provided herein. As one example, a nuclease-inactive Cas9 domain comprises the amino acid sequence set forth in Cloning vector pPlatTET-gRNA2 (Accession No. BAV54124).

[0270] The amino acid sequence of an exemplary catalytically inactive Cas9 (dCas9) is as follows:

(SEQ ID NO: 35)
MDKKYSIGLAIGTNSVGWAVITDEYKVPSKKFKVLGNTDRHSIKKNLIGA
LLFDSGETAEATRLKRTARRRYTRRKNRICYLQEIFSNEMAKVDDSFFHR
LEESFLVEEDKKHERHPIFGNIVDEVAYHEKYPTIYHLRKKLVDSTDKAD
LRLIYLALAHMIKFRGHFLIEGDLNPDNSDVDKLFIQLVQTYNQLFEENP
INASGVDAKAILSARLSKSRRLENLIAQLPGEKKNGLFGNLIALSLGLTP
NFKSNFDLAEDAKLQLSKDTYDDDLDNLLAQIGDQYADLFLAAKNLSDAI
LLSDILRVNTEITKAPLSASMIKRYDEHHQDLTLLKALVRQQLPEKYKEI
FFDQSKNGYAGYIDGGASQEEFYKFIKPILEKMDGTEELLVKLNREDLLR
KQRTFDNGSIPHQIHLGELHAILRRQEDFYPFLKDNREKIEKILTFRIPY
YVGPLARGNSRFAWMTRKSEETITPWNFEEVVDKGASAQSFIERMTNFDK
NLPNEKVLPKHSLLYEYFTVYNELTKVKYVTEGMRKPAFLSGEQKKAIVD
LLFKTNRKVTVKQLKEDYFKKIECFDSVEISGVEDRFNASLGTYHDLLKI
IKDKDFLDNEENEDILEDIVLTLTLFEDREMIEERLKTYAHLFDDKVMKQ
LKRRRYTGWGRLSRKLINGIRDKQSGKTILDFLKSDGFANRNFMQLIHDD
SLTFKEDIQKAQVSGQGDSLHEHIANLAGSPAIKKGILQTVKVVDELVKV
MGRHKPENIVIEMARENQTTQKGQKNSRERMKRIEEGIKELGSQILKEHP
VENTQLQNEKLYLYYLQNGRDMYVDQELDINRLSDYDVDAIVPQSFLKDD
SIDNKVLTRSDKNRGKSDNVPSEEVVKKMKNYWRQLLNAKLITQRKFDNL
TKAERGGLSELDKAGFIKRQLVETRQITKHVAQILDSRMNTKYDENDKLI
REVKVITLKSKLVSDFRKDFQFYKVREINNYHHAHDAYLNAVVGTALIKK
YPKLESEFVYGDYKVYDVRKMIAKSEQEIGKATAKYFFYSNIMNFFKTEI
TLANGEIRKRPLIETNGETGEIVWDKGRDFATVRKVLSMPQVNIVKKTEV
QTGGFSKESILPKRNSDKLIARKKDWDPKKYGGFDSPTVAYSVLVVAKVE
KGKSKKLKSVKELLGITIMERSSFEKNPIDFLEAKGYKEVKKDLIIKLPK
YSLFELENGRKRMLASAGELQKGNELALPSKYVNFLYLASHYEKLKGSPE
DNEQKQLFVEQHKHYLDEIIEQISEFSKRVILADANLDKVLSAYNKHRDK
PIREQAENIIHLFTLINLGAPAAFKYFDTTIDRKRYTSTKEVLDATLIHQ
SITGLYETRIDLSQLGGD

(see, e.g., Qi et al., “Repurposing CRISPR as an RNA-guided platform for sequence-specific control of gene expression.” Cell. 2013; 152(5):1173-83, the entire contents of which are incorporated herein by reference).

[0271] Additional suitable nuclease-inactive dCas9 domains will be apparent to those of skill in the art based on this disclosure and knowledge in the field, and are within the scope of this disclosure. Such additional exemplary suitable nuclease-inactive Cas9 domains include, but are not limited to, D10A/H840A, D10A/D839A/H840A, and D10A/D839A/H840A/N863A mutant domains (See, e.g., Prashant et al., CAS9 transcriptional activators for target specificity screening and paired nickases for cooperative genome engineering. Nature Biotechnology. 2013; 31(9): 833-838, the entire contents of which are incorporated herein by reference).

[0272] In some embodiments, a Cas9 nuclease has an inactive (e.g., an inactivated) DNA cleavage domain, that is, the Cas9 is a nickase, referred to as an “nCas9” protein (for “nickase” Cas9). A nuclease-inactivated Cas9 protein may interchangeably be referred to as a “dCas9” protein (for nuclease-“dead” Cas9) or catalytically inactive Cas9. Methods for generating a Cas9 protein (or a fragment thereof) having an inactive DNA cleavage domain are known (See, e.g., Jinek et al., Science. 337:816-821 (2012); Qi et al., “Repurposing CRISPR as an RNA-Guided Platform for Sequence-Specific Control of Gene Expression” (2013) Cell. 28; 152(5):1173-83, the entire contents of each of which are incorporated herein by reference). For example, the DNA cleavage domain of Cas9 is known to include two subdomains, the HNH nuclease subdomain and the RuvC1 subdomain. The HNH subdomain cleaves the strand complementary to the gRNA, whereas the RuvC1 subdomain cleaves the non-complementary strand. Mutations within these subdomains can silence the nuclease activity of Cas9. For example, the mutations D10A and H840A completely inactivate the nuclease activity of S. pyogenes Cas9 (Jinek et al., Science. 337:816-821 (2012); Qi et al., Cell. 28; 152(5):1173-83 (2013)).

[0273] In some embodiments, the dCas9 domain comprises an amino acid sequence that is at least 60%, at least 65%, at least 70%, at least 75%, at least 80%, at least 85%, at least 90%, at least 95%, at least 96%, at least 97%, at least 98%, at least 99%, or at least 99.5% identical to any one of the dCas9 domains provided herein. In some embodiments, the Cas9 domain comprises an amino acid sequences that has 1, 2, 3, 4, 5, 6, 7, 8, 9, 10, 11, 12, 13, 14, 15, 16, 17, 18, 19, 20, 21, 22, 21, 24, 25, 26, 27, 28, 29, 30, 31, 32, 33, 34, 35, 36, 37, 38, 39, 40, 41, 42, 43, 44, 45, 46, 47, 48, 49, 50 or more or more mutations compared to any one of the amino acid sequences set forth herein. In some embodiments, the Cas9 domain comprises an amino acid sequence that has at least 10, at least 15, at least 20, at least 30, at least 40, at least 50, at least 60, at least 70, at least 80, at least 90, at least 100, at least 150, at least 200, at least 250, at least 300, at least 350, at least 400, at least 500, at least 600, at least 700, at least 800, at least 900, at least 1000, at least 1100, or at least 1200 identical contiguous amino acid residues as compared to any one of the amino acid sequences set forth herein.

[0274] In some embodiments, dCas9 corresponds to, or comprises in part or in whole, a Cas9 amino acid sequence having one or more mutations that inactivate the Cas9 nuclease activity. For example, in some embodiments, a dCas9 domain comprises D10A and an H840A mutation or corresponding mutations in another Cas9.

[0275] In some embodiments, the dCas9 comprises the amino acid sequence of dCas9 (D10A and H840A):

(SEQ ID NO: 35)
MDKKYSIGLAIGINSVGWAVITDEYKVPSKKFKVLGNTDRHSIKKNLIGALLFDSGETAEATRL
KRTARRRYTRRKNRICYLQEIFSNEMAKVDDSFFHRLEESFLVEEDKKHERHPIFGNIVDEVAY
HEKYPTIYHLRKKLVDSTDKADLRLIYLALAHMIKFRGHFLIEGDLNPDNSDVDKLFIQLVQTY
NQLFEENPINASGVDAKAILSARLSKSRRLENLIAQLPGEKKNGLFGNLIALSLGLTPNFKSNF
DLAEDAKLQLSKDTYDDDLDNLLAQIGDQYADLFLAAKNLSDAILLSDILRVNTEITKAPLSAS
MIKRYDEHHQDLTLLKALVRQQLPEKYKEIFFDQSKNGYAGYIDGGASQEEFYKFIKPILEKMD
GTEELLVKLNREDLLRKQRTFDNGSIPHQIHLGELHAILRRQEDFYPFLKDNREKIEKILTFRI
PYYVGPLARGNSRFAWMTRKSEETITPWNFEEVVDKGASAQSFIERMTNFDKNLPNEKVLPKHS
LLYEYFTVYNELTKVKYVTEGMRKPAFLSGEQKKAIVDLLFKTNRKVTVKQLKEDYFKKIECFD
SVEISGVEDRFNASLGTYHDLLKIIKDKDFLDNEENEDILEDIVLTLTLFEDREMIEERLKTYA
HLFDDKVMKQLKRRRYTGWGRLSRKLINGIRDKQSGKTILDFLKSDGFANRNFMQLIHDDSLTF
KEDIQKAQVSGQGDSLHEHIANLAGSPAIKKGILQTVKVVDELVKVMGRHKPENIVIEMARENQ
TTQKGQKNSRERMKRIEEGIKELGSQILKEHPVENTQLQNEKLYLYYLQNGRDMYVDQELDINR
LSDYDVDAIVPQSFLKDDSIDNKVLTRSDKNRGKSDNVPSEEVVKKMKNYWRQLLNAKLITQRK
FDNLTKAERGGLSELDKAGFIKRQLVETRQITKHVAQILDSRMNTKYDENDKLIREVKVITLKS
KLVSDFRKDFQFYKVREINNYHHAHDAYLNAVVGTALIKKYPKLESEFVYGDYKVYDVRKMIAK
SEQEIGKATAKYFFYSNIMNFFKTEITLANGEIRKRPLIETNGETGEIVWDKGRDFATVRKVLS
MPQVNIVKKTEVQTGGFSKESILPKRNSDKLIARKKDWDPKKYGGFDSPTVAYSVLVVAKVEKG
KSKKLKSVKELLGITIMERSSFEKNPIDFLEAKGYKEVKKDLIIKLPKYSLFELENGRKRMLAS
AGELQKGNELALPSKYVNFLYLASHYEKLKGSPEDNEQKQLFVEQHKHYLDEIIEQISEFSKRV
ILADANLDKVLSAYNKHRDKPIREQAENIIHLFTLTNLGAPAAFKYFDTTIDRKRYTSTKEVLD
ATLIHQSITGLYETRIDLSQLGGD
(single underline: HNH domain; double underline: RuvC domain).

[0276] In some embodiments, the Cas9 domain comprises a D10A mutation, while the residue at position 840 remains a histidine in the amino acid sequence provided above, or at corresponding positions in any of the amino acid sequences provided herein.

[0277] In other embodiments, dCas9 variants having mutations other than D10A and H840A are provided, which, e.g., result in nuclease inactivated Cas9 (dCas9). Such mutations, by way of example, include other amino acid substitutions at D10 and H840, or other substitutions within the nuclease domains of Cas9 (e.g., substitutions in the HNH nuclease subdomain and/or the RuvC1 subdomain). In some embodiments, variants or homologues of dCas9 are provided which are at least about 70% identical, at least about 80% identical, at least about 90% identical, at least about 95% identical, at least about 98% identical, at least about 99% identical, at least about 99.5% identical, or at least about 99.9% identical. In some embodiments, variants of dCas9 are provided having amino acid sequences which are shorter, or longer, by about 5 amino acids, by about 10 amino acids, by about 15 amino acids, by about 20 amino acids, by about 25 amino acids, by about 30 amino acids, by about 40 amino acids, by about 50 amino acids, by about 75 amino acids, by about 100 amino acids or more.

[0278] In some embodiments, the Cas9 domain is a Cas9 nickase. The Cas9 nickase may be a Cas9 protein that is capable of cleaving only one strand of a duplexed nucleic acid molecule (e.g., a duplexed DNA molecule). In some embodiments the Cas9 nickase cleaves the target strand of a duplexed nucleic acid molecule, meaning that the Cas9 nickase cleaves the strand that is base paired to (complementary to) a gRNA (e.g., an sgRNA) that is bound to the Cas9. In some embodiments, a Cas9 nickase comprises a D10A mutation and has a histidine at position 840. In some embodiments the Cas9 nickase cleaves the non-target, non-base-edited strand of a duplexed nucleic acid molecule, meaning that the Cas9 nickase cleaves the strand that is not base paired to a gRNA (e.g., an sgRNA) that is bound to the Cas9. In some embodiments, a Cas9 nickase comprises an H840A mutation and has an aspartic acid residue at position 10, or a corresponding mutation. In some embodiments the Cas9 nickase comprises an amino acid sequence that is at least 60%, at least 65%, at least 70%, at least 75%, at least 80%, at least 85%, at least 90%, at least 95%, at least 96%, at least 97%, at least 98%, at least 99%, or at least 99.5% identical to any one of the Cas9 nickases provided herein. Additional suitable Cas9 nickases will be apparent to those of skill in the art based on this disclosure and knowledge in the field and are within the scope of this disclosure.

[0279] The amino acid sequence of an exemplary catalytically Cas9 nickase (nCas9) is as follows:

(SEQ ID NO: 31)
MDKKYSIGLAIGTNSVGWAVITDEYKVPSKKFKVLGNTDRHSIKKNLIGA
LLFDSGETAEATRLKRTARRRYTRRKNRICYLQEIFSNEMAKVDDSFFHR
LEESFLVEEDKKHERHPIFGNIVDEVAYHEKYPTIYHLRKKLVDSTDKAD
LRLIYLALAHMIKFRGHFLIEGDLNPDNSDVDKLFIQLVQTYNQLFEENP
INASGVDAKAILSARLSKSRRLENLIAQLPGEKKNGLFGNLIALSLGLTP
NFKSNFDLAEDAKLQLSKDTYDDDLDNLLAQIGDQYADLFLAAKNLSDAI
LLSDILRVNTEITKAPLSASMIKRYDEHHQDLTLLKALVRQQLPEKYKEI
FFDQSKNGYAGYIDGGASQEEFYKFIKPILEKMDGTEELLVKLNREDLLR
KQRTFDNGSIPHQIHLGELHAILRRQEDFYPFLKDNREKIEKILTFRIPY
YVGPLARGNSRFAWMTRKSEETITPWNFEEVVDKGASAQSFIERMTNFDK
NLPNEKVLPKHSLLYEYFTVYNELTKVKYVTEGMRKPAFLSGEQKKAIVD
LLFKTNRKVTVKQLKEDYFKKIECFDSVEISGVEDRFNASLGTYHDLLKI
IKDKDFLDNEENEDILEDIVLTLTLFEDREMIEERLKTYAHLFDDKVMKQ
LKRRRYTGWGRLSRKLINGIRDKQSGKTILDFLKSDGFANRNFMQLIHDD
SLTFKEDIQKAQVSGQGDSLHEHIANLAGSPAIKKGILQTVKVVDELVKV
MGRHKPENIVIEMARENQTTQKGQKNSRERMKRIEEGIKELGSQILKEHP
VENTQLQNEKLYLYYLQNGRDMYVDQELDINRLSDYDVDHIVPQSFLKDD
SIDNKVLTRSDKNRGKSDNVPSEEVVKKMKNYWRQLLNAKLITQRKFDNL
TKAERGGLSELDKAGFIKRQLVETRQITKHVAQILDSRMNTKYDENDKLI
REVKVITLKSKLVSDFRKDFQFYKVREINNYHHAHDAYLNAVVGTALIKK
YPKLESEFVYGDYKVYDVRKMIAKSEQEIGKATAKYFFYSNIMNFFKTEI
TLANGEIRKRPLIETNGETGEIVWDKGRDFATVRKVLSMPQVNIVKKTEV
QTGGFSKESILPKRNSDKLIARKKDWDPKKYGGFDSPTVAYSVLVVAKVE
KGKSKKLKSVKELLGITIMERSSFEKNPIDFLEAKGYKEVKKDLIIKLPK
YSLFELENGRKRMLASAGELQKGNELALPSKYVNFLYLASHYEKLKGSPE
DNEQKQLFVEQHKHYLDEIIEQISEFSKRVILADANLDKVLSAYNKHRDK
PIREQAENIIHLFTLTNLGAPAAFKYFDTTIDRKRYTSTKEVLDATLIHQ
SITGLYETRIDLSQLGGD

[0280] In some embodiments, Cas9 refers to a Cas9 from archaea (e.g., nanoarchaea), which constitute a domain and kingdom of single-celled prokaryotic microbes. In some embodiments, the programmable nucleotide binding protein may be a CasX or CasY protein, which have been described in, for example, Burstein et al., “New CRISPR-Cas systems from uncultivated microbes.” Cell Res. 2017 Feb. 21. doi: 10.1038/cr.2017.21, the entire contents of which is hereby incorporated by reference. Using genome-resolved metagenomics, a number of CRISPR-Cas systems were identified, including the first reported Cas9 in the archaeal domain of life. This divergent Cas9 protein was found in little-studied nanoarchaea as part of an active CRISPR-Cas system. In bacteria, two previously unknown systems were discovered, CRISPR-CasX and CRISPR-CasY, which are among the most compact systems yet discovered. In some embodiments, in a base editor system described herein Cas9 is replaced by CasX, or a variant of CasX. In some embodiments, in a base editor system described herein Cas9 is replaced by CasY, or a variant of CasY. It should be appreciated that other RNA-guided DNA binding proteins may be used as a nucleic acid programmable DNA binding protein (napDNAbp) and are within the scope of this disclosure.

[0281] In some embodiments, the nucleic acid programmable DNA binding protein (napDNAbp) of any of the fusion proteins provided herein may be a CasX or CasY protein. In some embodiments, the napDNAbp is a CasX protein. In some embodiments, the napDNAbp is a CasY protein. In some embodiments, the napDNAbp comprises an amino acid sequence that is at least 85%, at least 90%, at least 91%, at least 92%, at least 93%, at least 94%, at least 95%, at least 96%, at least 97%, at least 98%, at least 99%, or at ease 99.5% identical to a naturally-occurring CasX or CasY protein. In some embodiments, the programmable nucleotide binding protein is a naturally-occurring CasX or CasY protein. In some embodiments, the programmable nucleotide binding protein comprises an amino acid sequence that is at least 85%, at least 90%, at least 91%, at least 92%, at least 93%, at least 94%, at least 95%, at least 96%, at least 97%, at least 98%, at least 99%, or at ease 99.5% identical to any CasX or CasY protein described herein. It should be appreciated that CasX and CasY from other bacterial species may also be used in accordance with the present disclosure.

[0282] An exemplary CasX ((uniprot.org/uniprot/F0NN87; uniprot.org/uniprot/F0NH53) tr|F0NN87|F0NN87_SULIHCRISPR-associatedCasx protein OS=Sulfolobus islandicus (strain HVE10/4) GN=SiH_0402 PE=4 SV=1) amino acid sequence is as follows:

(SEQ ID NO: 40)
MEVPLYNIFGDNYIIQVATEAENSTIYNNKVEIDDEELRNVLNLAYKIAK
NNEDAAAERRGKAKKKKGEEGETTTSNIILPLSGNDKNPWTETLKCYNFP
TTVALSEVFKNFSQVKECEEVSAPSFVKPEFYEFGRSPGMVERTRRVKLE
VEPHYLIIAAAGWVLTRLGKAKVSEGDYVGVNVFTPTRGILYSLIQNVNG
IVPGIKPETAFGLWIARKVVSSVTNPNVSVVRIYTISDAVGQNPTTINGG
FSIDLTKLLEKRYLLSERLEAIARNALSISSNMRERYIVLANYIYEYLTG
SKRLEDLLYFANRDLIMNLNSDDGKVRDLKLISAYVNGELIRGEG.

[0283] An exemplary CasX (>tr|F0NH53|F0NH53_SULIR CRISPR associated protein, Casx OS=Sulfolobus islandicus (strain REY15A) GN=SiRe_0771 PE=4 SV=1) amino acid sequence is as follows:

(SEQ ID NO: 41)
MEVPLYNIFGDNYIIQVATEAENSTIYNNKVEIDDEELRNVLNLAYKIAK
NNEDAAAERRGKAKKKKGEEGETTTSNIILPLSGNDKNPWTETLKCYNFP
TTVALSEVFKNFSQVKECEEVSAPSFVKPEFYKFGRSPGMVERTRRVKLE
VEPHYLIMAAAGWVLTRLGKAKVSEGDYVGVNVFTPTRGILYSLIQNVNG
IVPGIKPETAFGLWIARKVVSSVTNPNVSVVSIYTISDAVGQNPTTINGG
FSIDLTKLLEKRDLLSERLEAIARNALSISSNMRERYIVLANYIYEYLIG
SKRLEDLLYFANRDLIMNLNSDDGKVRDLKLISAYVNGELIRGEG.
Deltaproteobacteria CasX
(SEQ ID NO: 79)
MEKRINKIRKKLSADNATKPVSRSGPMKTLLVRVMTDDLKKRLEKRRKKP
EVMPQVISNNAANNLRMLLDDYTKMKEAILQVYWQEFKDDHVGLMCKFAQ
PASKKIDQNKLKPEMDEKGNLTTAGFACSQCGQPLFVYKLEQVSEKGKAY
TNYFGRCNVAEHEKLILLAQLKPVKDSDEAVTYSLGKFGQRALDFYSIHV
TKESTHPVKPLAQIAGNRYASGPVGKALSDACMGTIASFLSKYQDIIIEH
QKVVKGNQKRLESLRELAGKENLEYPSVTLPPQPHTKEGVDfAYNEVIAR
VRMWVNLNLWQKLKLSRDDAKPLLRLKGFPSFPVVERRENEVDWWNTINE
VKKLIDAKRDMGRVFWSGVTAEKRNTILEGYNYLPNENDHKKREGSLENP
KKPAKRQFGDLLLYLEKKYAGDWGKVFDEAWERIDKKIAGLTSHIEREEA
RNAEDAQSKAVLTDWLRAKASFVLERLKEMDEKEFYACEIQLQKWYGDLR
GNPFAVEAENRVVDISGFSIGSDGHSIQYRNLLAWKYLENGKREFYLLMN
YGKKGRIRFTDGTDIKKSGKWQGLLYGGGKAKVIDLTFDPDDEQLIILPL
AFGTRQGREFIWNDLLSLETGLIKLANGRVIEKTIYNKKIGRDEPALFVA
LTFERREVVDPSNIKPVNLIGVARGENIPAVIALTDPEGCPLPEFKDSSG
GPTDILRIGEGYKEKQRAIQAAKEVEQRRAGGYSRKFASKSRNLADDMVR
NSARDLFYHAVTHDAVLVFANLSRGFGRQGKRTFMTERQYTKMEDWLTAK
LAYEGLTSKTYLSKTLAQYTSKTCSNCGFTITYADMDVMLVRLKKTSDGW
ATTLNNKELKAEYQITYYNRYKRQTVEKELSAELDRLSEESGNNDISKWT
KGRRDEALFLLKKRFSHRPVQEQFVCLDCGHEVHAAEQAALNIARSWLFL
NSNSTEFKSYKSGKQPFVGAWQAFYKRRLKEVWKPNA

[0284] An exemplary CasY ((ncbi.nlm.nih.gov/protein/APG80656.1)>APG80656.1 CRISPR-associated protein CasY [uncultured Parcubacteria group bacterium]) amino acid sequence is as follows:

(SEQ ID NO: 43)
MSKRHPRISGVKGYRLHAQRLEYTGKSGAMRTIKYPLYSSPSGGRTVPRE
IVSAINDDYVGLYGLSNFDDLYNAEKRNEEKVYSVLDFWYDCVQYGAVFS
YTAPGLLKNVAEVRGGSYELTKTLKGSHLYDELQIDKVIKFLNKKEISRA
NGSLDKLKKDIIDCFKAEYRERHKDQCNKLADDIKNAKKDAGASLGERQK
KLFRDFFGISEQSENDKPSFTNPLNLTCCLLPFDTVNNNRNRGEVLFNKL
KEYAQKLDKNEGSLEMWEYIGIGNSGTAFSNFLGEGFLGRLRENKITELK
KAMMDITDAWRGQEQEEELEKRLRILAALTIKLREPKFDNHWGGYRSDIN
GKLSSWLQNYINQTVKIKEDLKGHKKDLKKAKEMINRFGESDTKEEAVVS
SLLESIEKIVPDDSADDEKPDIPAIAIYRRFLSDGRLTLNRFVQREDVQE
ALIKERLEAEKKKKPKKRKKKSDAEDEKETIDFKELFPHLAKPLKLVPNF
YGDSKRELYKKYKNAAIYTDALWKAVEKIYKSAFSSSLKNSFFDTDFDKD
FFIKRLQKIFSVYRRFNTDKWKPIVKNSFAPYCDIVSLAENEVLYKPKQS
RSRKSAAIDKNRVRLPSTENIAKAGIALARELSVAGFDWKDLLKKEEHEE
YIDLIELHKTALALLLAVTETQLDISALDFVENGTVKDFMKTRDGNLVLE
GRFLEMFSQSIVFSELRGLAGLMSRKEFITRSAIQTMNGKQAELLYIPHE
FQSAKITTPKEMSRAFLDLAPAEFATSLEPESLSEKSLLKLKQMRYYPHY
FGYELTRTGQGIDGGVAENALRLEKSPVKKREIKCKQYKTLGRGQNKIVL
YVRSSYYQTQFLEWFLHRPKNVQTDVAVSGSFLIDEKKVKTRWNYDALTV
ALEPVSGSERVFVSQPFTIFPEKSAEEEGQRYLGIDIGEYGIAYTALEIT
GDSAKILDQNFISDPQLKTLREEVKGLKLDQRRGTFAMPSTKIARIRESL
VHSLRNRIHHLALKHKAKIVYELEVSRFEEGKQKIKKVYATLKKADVYSE
IDADKNLQTTVWGKLAVASEISASYTSQFCGACKKLWRAEMQVDETITTQ
ELIGTVRVIKGGTLIDAIKDFMRPPIFDENDTPFPKYRDFCDKHHISKKM
RGNSCLFICPFCRANADADIQASQTIALLRYVKEEKKVEDYFERFRKLKN
IKVLGQMKKI.

[0285] The Cas9 nuclease has two functional endonuclease domains: RuvC and HNH. Cas9 undergoes a conformational change upon target binding that positions the nuclease domains to cleave opposite strands of the target DNA. The end result of Cas9-mediated DNA cleavage is a double-strand break (DSB) within the target DNA (˜3-4 nucleotides upstream of the PAM sequence). The resulting DSB is then repaired by one of two general repair pathways: (1) the efficient but error-prone non-homologous end joining (NHEJ) pathway; or (2) the less efficient but high-fidelity homology directed repair (HDR) pathway.

[0286] The “efficiency” of non-homologous end joining (NHEJ) and/or homology directed repair (HDR) can be calculated by any convenient method. For example, in some embodiments, efficiency can be expressed in terms of percentage of successful HDR. For example, a surveyor nuclease assay can be used to generate cleavage products and the ratio of products to substrate can be used to calculate the percentage. For example, a surveyor nuclease enzyme can be used that directly cleaves DNA containing a newly integrated restriction sequence as the result of successful HDR. More cleaved substrate indicates a greater percent HDR (a greater efficiency of HDR). As an illustrative example, a fraction (percentage) of HDR can be calculated using the following equation [(cleavage products)/(substrate plus cleavage products)] (e.g., (b+c)/(a+b+c), where “a” is the band intensity of DNA substrate and “b” and “c” are the cleavage products).

[0287] In some embodiments, efficiency can be expressed in terms of percentage of successful NHEJ. For example, a T7 endonuclease I assay can be used to generate cleavage products and the ratio of products to substrate can be used to calculate the percentage NHEJ. T7 endonuclease I cleaves mismatched heteroduplex DNA which arises from hybridization of wild-type and mutant DNA strands (NHEJ generates small random insertions or deletions (indels) at the site of the original break). More cleavage indicates a greater percent NHEJ (a greater efficiency of NHEJ). As an illustrative example, a fraction (percentage) of NHEJ can be calculated using the following equation: (1−(1−(b+c)/(a+b+c))^{1/2})×100, where “a” is the band intensity of DNA substrate and “b” and “c” are the cleavage products (Ran et. al., Cell. 2013 Sep. 12; 154(6):1380-9; and Ran et al., Nat Protoc. 2013 November; 8(11): 2281-2308).

[0288] The NHEJ repair pathway is the most active repair mechanism, and it frequently causes small nucleotide insertions or deletions (indels) at the DSB site. The randomness of NHEJ-mediated DSB repair has important practical implications, because a population of cells expressing Cas9 and a gRNA or a guide polynucleotide can result in a diverse array of mutations. In most cases, NHEJ gives rise to small indels in the target DNA that result in amino acid deletions, insertions, or frameshift mutations leading to premature stop codons within the open reading frame (ORF) of the targeted gene. The ideal end result is a loss-of-function mutation within the targeted gene.

[0289] While NHEJ-mediated DSB repair often disrupts the open reading frame of the gene, homology directed repair (HDR) can be used to generate specific nucleotide changes ranging from a single nucleotide change to large insertions like the addition of a fluorophore or tag. In order to utilize HDR for gene editing, a DNA repair template containing the desired sequence can be delivered into the cell type of interest with the gRNA(s) and Cas9 or Cas9 nickase. The repair template can contain the desired edit as well as additional homologous sequence immediately upstream and downstream of the target (termed left & right homology arms). The length of each homology arm can be dependent on the size of the change being introduced, with larger insertions requiring longer homology arms. The repair template can be a single-stranded oligonucleotide, double-stranded oligonucleotide, or a double-stranded DNA plasmid. The efficiency of HDR is generally low (<10% of modified alleles) even in cells that express Cas9, gRNA and an exogenous repair template. The efficiency of HDR can be enhanced by synchronizing the cells, since HDR takes place during the S and G2 phases of the cell cycle. Chemically or genetically inhibiting genes involved in NHEJ can also increase HDR frequency.

[0290] In some embodiments, Cas9 is a modified Cas9. A given gRNA targeting sequence can have additional sites throughout the genome where partial homology exists. These sites are called off-targets and need to be considered when designing a gRNA. In addition to optimizing gRNA design, CRISPR specificity can also be increased through modifications to Cas9. Cas9 generates double-strand breaks (DSBs) through the combined activity of two nuclease domains, RuvC and HNH. Cas9 nickase, a D10A mutant of SpCas9, retains one nuclease domain and generates a DNA nick rather than a DSB. The nickase system can also be combined with HDR-mediated gene editing for specific gene edits.

[0291] In some embodiments, Cas9 is a variant Cas9 protein. A variant Cas9 polypeptide has an amino acid sequence that is different by one amino acid (e.g., has a deletion, insertion, substitution, fusion) when compared to the amino acid sequence of a wild type Cas9 protein. In some instances, the variant Cas9 polypeptide has an amino acid change (e.g., deletion, insertion, or substitution) that reduces the nuclease activity of the Cas9 polypeptide. For example, in some instances, the variant Cas9 polypeptide has less than 50%, less than 40%, less than 30%, less than 20%, less than 10%, less than 5%, or less than 1% of the nuclease activity of the corresponding wild-type Cas9 protein. In some embodiments, the variant Cas9 protein has no substantial nuclease activity. When a subject Cas9 protein is a variant Cas9 protein that has no substantial nuclease activity, it can be referred to as “dCas9.”

[0292] In some embodiments, a variant Cas9 protein has reduced nuclease activity. For example, a variant Cas9 protein exhibits less than about 20%, less than about 15%, less than about 10%, less than about 5%, less than about 1%, or less than about 0.1%, of the endonuclease activity of a wild-type Cas9 protein, e.g., a wild-type Cas9 protein.

[0293] In some embodiments, a variant Cas9 protein can cleave the complementary strand of a guide target sequence but has reduced ability to cleave the non-complementary strand of a double stranded guide target sequence. For example, the variant Cas9 protein can have a mutation (amino acid substitution) that reduces the function of the RuvC domain. As a non-limiting example, in some embodiments, a variant Cas9 protein has a D10A (aspartate to alanine at amino acid position 10) and can therefore cleave the complementary strand of a double stranded guide target sequence but has reduced ability to cleave the non-complementary strand of a double stranded guide target sequence (thus resulting in a single strand break (SSB) instead of a double strand break (DSB) when the variant Cas9 protein cleaves a double stranded target nucleic acid) (see, for example, Jinek et al., Science. 2012 Aug. 17; 337(6096):816-21).

[0294] In some embodiments, a variant Cas9 protein can cleave the non-complementary strand of a double stranded guide target sequence but has reduced ability to cleave the complementary strand of the guide target sequence. For example, the variant Cas9 protein can have a mutation (amino acid substitution) that reduces the function of the HNH domain (RuvC/HNH/RuvC domain motifs). As a non-limiting example, in some embodiments, the variant Cas9 protein has an H840A (histidine to alanine at amino acid position 840) mutation and can therefore cleave the non-complementary strand of the guide target sequence but has reduced ability to cleave the complementary strand of the guide target sequence (thus resulting in a SSB instead of a DSB when the variant Cas9 protein cleaves a double stranded guide target sequence). Such a Cas9 protein has a reduced ability to cleave a guide target sequence (e.g., a single stranded guide target sequence) but retains the ability to bind a guide target sequence (e.g., a single stranded guide target sequence).

[0295] In some embodiments, a variant Cas9 protein has a reduced ability to cleave both the complementary and the non-complementary strands of a double stranded target DNA. As a non-limiting example, in some embodiments, the variant Cas9 protein harbors both the D10A and the H840A mutations such that the polypeptide has a reduced ability to cleave both the complementary and the non-complementary strands of a double stranded target DNA. Such a Cas9 protein has a reduced ability to cleave a target DNA (e.g., a single stranded target DNA) but retains the ability to bind a target DNA (e.g., a single stranded target DNA).

[0296] As another non-limiting example, in some embodiments, the variant Cas9 protein harbors W476A and W1126A mutations such that the polypeptide has a reduced ability to cleave a target DNA. Such a Cas9 protein has a reduced ability to cleave a target DNA (e.g., a single stranded target DNA) but retains the ability to bind a target DNA (e.g., a single stranded target DNA).

[0297] As another non-limiting example, in some embodiments, the variant Cas9 protein harbors P475A, W476A, N477A, D1125A, W1126A, and D1127A mutations such that the polypeptide has a reduced ability to cleave a target DNA. Such a Cas9 protein has a reduced ability to cleave a target DNA (e.g., a single stranded target DNA) but retains the ability to bind a target DNA (e.g., a single stranded target DNA).

[0298] As another non-limiting example, in some embodiments, the variant Cas9 protein harbors H840A, W476A, and W1126A, mutations such that the polypeptide has a reduced ability to cleave a target DNA. Such a Cas9 protein has a reduced ability to cleave a target DNA (e.g., a single stranded target DNA) but retains the ability to bind a target DNA (e.g., a single stranded target DNA). As another non-limiting example, in some embodiments, the variant Cas9 protein harbors H840A, D10A, W476A, and W1126A, mutations such that the polypeptide has a reduced ability to cleave a target DNA. Such a Cas9 protein has a reduced ability to cleave a target DNA (e.g., a single stranded target DNA) but retains the ability to bind a target DNA (e.g., a single stranded target DNA). In some embodiments, the variant Cas9 has restored catalytic His residue at position 840 in the Cas9 HNH domain (A840H).

[0299] As another non-limiting example, in some embodiments, the variant Cas9 protein harbors, H840A, P475A, W476A, N477A, D1125A, W1126A, and D1127A mutations such that the polypeptide has a reduced ability to cleave a target DNA. Such a Cas9 protein has a reduced ability to cleave a target DNA (e.g., a single stranded target DNA) but retains the ability to bind a target DNA (e.g., a single stranded target DNA). As another non-limiting example, in some embodiments, the variant Cas9 protein harbors D10A, H840A, P475A, W476A, N477A, D1125A, W1126A, and D1127A mutations such that the polypeptide has a reduced ability to cleave a target DNA. Such a Cas9 protein has a reduced ability to cleave a target DNA (e.g., a single stranded target DNA) but retains the ability to bind a target DNA (e.g., a single stranded target DNA). In some embodiments, when a variant Cas9 protein harbors W476A and W1126A mutations or when the variant Cas9 protein harbors P475A, W476A, N477A, D1125A, W1126A, and D1127A mutations, the variant Cas9 protein does not bind efficiently to a PAM sequence. Thus, in some such cases, when such a variant Cas9 protein is used in a method of binding, the method does not require a PAM sequence. In other words, in some embodiments, when such a variant Cas9 protein is used in a method of binding, the method can include a guide RNA, but the method can be performed in the absence of a PAM sequence (and the specificity of binding is therefore provided by the targeting segment of the guide RNA). Other residues can be mutated to achieve the above effects (i.e., inactivate one or the other nuclease portions). As non-limiting examples, residues D10, G12, G17, E762, H840, N854, N863, H982, H983, A984, D986, and/or A987 can be altered (i.e., substituted). Also, mutations other than alanine substitutions are suitable.

[0300] In some embodiments, a variant Cas9 protein that has reduced catalytic activity (e.g., when a Cas9 protein has a D10, G12, G17, E762, H840, N854, N863, H982, H983, A984, D986, and/or a A987 mutation, e.g., D10A, G12A, G17A, E762A, H840A, N854A, N863A, H982A, H983A, A984A, and/or D986A), the variant Cas9 protein can still bind to target DNA in a site-specific manner (because it is still guided to a target DNA sequence by a guide RNA) as long as it retains the ability to interact with the guide RNA.

[0301] In some embodiments, the variant Cas protein can be spCas9, spCas9-VRQR, spCas9-VRER, xCas9 (sp), saCas9, saCas9-KKH, spCas9-MQKSER, spCas9-LRKIQK, or spCas9-LRVSQL.

[0302] In some embodiments, a modified SpCas9 including amino acid substitutions D1135M, S1136Q, G1218K, E1219F, A1322R, D1332A, R1335E, and T1337R (SpCas9-MQKFRAER) and having specificity for the altered PAM 5′-NGC-3′ was used.

[0303] Alternatives to S. pyogenes Cas9 can include RNA-guided endonucleases from the Cpf1 family that display cleavage activity in mammalian cells. CRISPR from Prevotella and Francisella 1 (CRISPR/Cpf1) is a DNA-editing technology analogous to the CRISPR/Cas9 system. Cpf1 is an RNA-guided endonuclease of a class II CRISPR/Cas system. This acquired immune mechanism is found in Prevotella and Francisella bacteria. Cpf1 genes are associated with the CRISPR locus, coding for an endonuclease that use a guide RNA to find and cleave viral DNA. Cpf1 is a smaller and simpler endonuclease than Cas9, overcoming some of the CRISPR/Cas9 system limitations. Unlike Cas9 nucleases, the result of Cpf1-mediated DNA cleavage is a double-strand break with a short 3′ overhang. Cpf1's staggered cleavage pattern can open up the possibility of directional gene transfer, analogous to traditional restriction enzyme cloning, which can increase the efficiency of gene editing. Like the Cas9 variants and orthologues described above, Cpf1 can also expand the number of sites that can be targeted by CRISPR to AT-rich regions or AT-rich genomes that lack the NGG PAM sites favored by SpCas9. The Cpf1 locus contains a mixed alpha/beta domain, a RuvC-I followed by a helical region, a RuvC-II and a zinc finger-like domain. The Cpf1 protein has a RuvC-like endonuclease domain that is similar to the RuvC domain of Cas9. Furthermore, Cpf1 does not have an HNH endonuclease domain, and the N-terminal of Cpf1 does not have the alpha-helical recognition lobe of Cas9. Cpf1 CRISPR-Cas domain architecture shows that Cpf1 is functionally unique, being classified as Class 2, type V CRISPR system. The Cpf1 loci encode Cas1, Cas2 and Cas4 proteins more similar to types I and III than from type II systems. Functional Cpf1 doesn't need the trans-activating CRISPR RNA (tracrRNA), therefore, only CRISPR (crRNA) is required. This benefits genome editing because Cpf1 is not only smaller than Cas9, but also it has a smaller sgRNA molecule (proximately half as many nucleotides as Cas9). The Cpf1-crRNA complex cleaves target DNA or RNA by identification of a protospacer adjacent motif 5′-YTN-3′ in contrast to the G-rich PAM targeted by Cas9. After identification of PAM, Cpf1 introduces a sticky-end-like DNA double-stranded break of 4 or 5 nucleotides overhang.

### Cas12 Domains of Nucleobase Editors

[0304] Typically, microbial CRISPR-Cas systems are divided into Class 1 and Class 2 systems. Class 1 systems have multisubunit effector complexes, while Class 2 systems have a single protein effector. For example, Cas9 and Cpf1 are Class 2 effectors, albeit different types (Type II and Type V, respectively). In addition to Cpf1, Class 2, Type V CRISPR-Cas systems also comprise Cas12a/Cpf1, Cas12b/C2c1, Cas12c/C2c3, Cas12d/CasY, Cas12e/CasX, Cas12g, Cas12h, and Cas12i). See, e.g., Shmakov et al., “Discovery and Functional Characterization of Diverse Class 2 CRISPR Cas Systems,” Mol. Cell, 2015 Nov. 5; 60(3): 385-397; Makarova et al., “Classification and Nomenclature of CRISPR-Cas Systems: Where from Here?” CRISPR Journal, 2018, 1(5): 325-336; and Yan et al., “Functionally Diverse Type V CRISPR-Cas Systems,” Science, 2019 Jan. 4; 363: 88-91; the entire contents of each is hereby incorporated by reference. Type V Cas proteins contain a RuvC (or RuvC-like) endonuclease domain. While production of mature CRISPR RNA (crRNA) is generally tracrRNA-independent, Cas12b/C2c1, for example, requires tracrRNA for production of crRNA. Cas12b/C2c1 depends on both crRNA and tracrRNA for DNA cleavage.

[0305] Nucleic acid programmable DNA binding proteins contemplated in the present invention include Cas proteins that are classified as Class 2, Type V (Cas12 proteins). Non-limiting examples of Cas Class 2, Type V proteins include Cas12a/Cpf1, Cas12b/C2c1, Cas12c/C2c3, Cas12d/CasY, Cas12e/CasX, Cas12g, Cas12h, and Cas12i, homologues thereof, or modified versions thereof. As used herein, a Cas12 protein can also be referred to as a Cas12 nuclease, a Cas12 domain, or a Cas12 protein domain. In some embodiments, the Cas12 proteins of the present invention comprise an amino acid sequence interrupted by an internally fused protein domain such as a deaminase domain.

[0306] In some embodiments, the Cas12 domain is a nuclease inactive Cas12 domain or a Cas12 nickase. In some embodiments, the Cas12 domain is a nuclease active domain. For example, the Cas12 domain may be a Cas12 domain that nicks one strand of a duplexed nucleic acid (e.g., duplexed DNA molecule). In some embodiments, the Cas12 domain comprises any one of the amino acid sequences as set forth herein. In some embodiments the Cas12 domain comprises an amino acid sequence that is at least 60%, at least 65%, at least 70%, at least 75%, at least 80%, at least 85%, at least 90%, at least 95%, at least 96%, at least 97%, at least 98%, at least 99%, or at least 99.5% identical to any one of the amino acid sequences set forth herein. In some embodiments, the Cas12 domain comprises an amino acid sequence that has 1, 2, 3, 4, 5, 6, 7, 8, 9, 10, 11, 12, 13, 14, 15, 16, 17, 18, 19, 20, 21, 22, 21, 24, 25, 26, 27, 28, 29, 30, 31, 32, 33, 34, 35, 36, 37, 38, 39, 40, 41, 42, 43, 44, 45, 46, 47, 48, 49, 50 or more mutations compared to any one of the amino acid sequences set forth herein. In some embodiments, the Cas12 domain comprises an amino acid sequence that has at least 10, at least 15, at least 20, at least 30, at least 40, at least 50, at least 60, at least 70, at least 80, at least 90, at least 100, at least 150, at least 200, at least 250, at least 300, at least 350, at least 400, at least 500, at least 600, at least 700, at least 800, at least 900, at least 1000, at least 1100, or at least 1200 identical contiguous amino acid residues as compared to any one of the amino acid sequences set forth herein.

[0307] In some embodiments, proteins comprising fragments of Cas12 are provided. For example, in some embodiments, a protein comprises one of two Cas12 domains: (1) the gRNA binding domain of Cas12; or (2) the DNA cleavage domain of Cas12. In some embodiments, proteins comprising Cas12 or fragments thereof are referred to as “Cas12 variants.” A Cas12 variant shares homology to Cas12, or a fragment thereof. For example, a Cas12 variant is at least about 70% identical, at least about 80% identical, at least about 90% identical, at least about 95% identical, at least about 96% identical, at least about 97% identical, at least about 98% identical, at least about 99% identical, at least about 99.5% identical, or at least about 99.9% identical to wild type Cas12. In some embodiments, the Cas12 variant may have 1, 2, 3, 4, 5, 6, 7, 8, 9, 10, 11, 12, 13, 14, 15, 16, 17, 18, 19, 20, 21, 22, 21, 24, 25, 26, 27, 28, 29, 30, 31, 32, 33, 34, 35, 36, 37, 38, 39, 40, 41, 42, 43, 44, 45, 46, 47, 48, 49, 50 or more amino acid changes compared to wild type Cas12. In some embodiments, the Cas12 variant comprises a fragment of Cas12 (e.g., a gRNA binding domain or a DNA cleavage domain), such that the fragment is at least about 70% identical, at least about 80% identical, at least about 90% identical, at least about 95% identical, at least about 96% identical, at least about 97% identical, at least about 98% identical, at least about 99% identical, at least about 99.5% identical, or at least about 99.9% identical to the corresponding fragment of wild type Cas12. In some embodiments, the fragment is at least 30%, at least 35%, at least 40%, at least 45%, at least 50%, at least 55%, at least 60%, at least 65%, at least 70%, at least 75%, at least 80%, at least 85%, at least 90%, at least 95% identical, at least 96%, at least 97%, at least 98%, at least 99%, or at least 99.5% of the amino acid length of a corresponding wild type Cas12. In some embodiments, the fragment is at least 100 amino acids in length. In some embodiments, the fragment is at least 100, 150, 200, 250, 300, 350, 400, 450, 500, 550, 600, 650, 700, 750, 800, 850, 900, 950, 1000, 1050, 1100, 1150, 1200, 1250, or at least 1300 amino acids in length.

[0308] In some embodiments, Cas12 corresponds to, or comprises in part or in whole, a Cas12 amino acid sequence having one or more mutations that alter the Cas12 nuclease activity. Such mutations, by way of example, include amino acid substitutions within the RuvC nuclease domain of Cas12. In some embodiments, variants or homologues of Cas12 are provided which are at least about 70% identical, at least about 80% identical, at least about 90% identical, at least about 95% identical, at least about 98% identical, at least about 99% identical, at least about 99.5% identical, or at least about 99.9% identical to a wild type Cas12. In some embodiments, variants of Cas12 are provided having amino acid sequences which are shorter, or longer, by about 5 amino acids, by about 10 amino acids, by about 15 amino acids, by about 20 amino acids, by about 25 amino acids, by about 30 amino acids, by about 40 amino acids, by about 50 amino acids, by about 75 amino acids, by about 100 amino acids or more.

[0309] In some embodiments, Cas12 fusion proteins as provided herein comprise the full-length amino acid sequence of a Cas12 protein, e.g., one of the Cas12 sequences provided herein. In other embodiments, however, fusion proteins as provided herein do not comprise a full-length Cas12 sequence, but only one or more fragments thereof. Exemplary amino acid sequences of suitable Cas12 domains are provided herein, and additional suitable sequences of Cas12 domains and fragments will be apparent to those of skill in the art.

[0310] Generally, the class 2, Type V Cas proteins have a single functional RuvC endonuclease domain (See, e.g., Chen et al., “CRISPR-Cas12a target binding unleashes indiscriminate single-stranded DNase activity,” Science 360:436-439 (2018)). In some cases, the Cas12 protein is a variant Cas12b protein. (See Strecker et al., Nature Communications, 2019, 10(1): Art. No.: 212). In one embodiment, a variant Cas12 polypeptide has an amino acid sequence that is different by 1, 2, 3, 4, 5 or more amino acids (e.g., has a deletion, insertion, substitution, fusion) when compared to the amino acid sequence of a wild type Cas12 protein. In some instances, the variant Cas12 polypeptide has an amino acid change (e.g., deletion, insertion, or substitution) that reduces the activity of the Cas12 polypeptide. For example, in some instances, the variant Cas12 is a Cas12b polypeptide that has less than 50%, less than 40%, less than 30%, less than 20%, less than 10%, less than 5%, or less than 1% of the nickase activity of the corresponding wild-type Cas12b protein. In some cases, the variant Cas12b protein has no substantial nickase activity.

[0311] In some cases, a variant Cas12b protein has reduced nickase activity. For example, a variant Cas12b protein exhibits less than about 20%, less than about 15%, less than about 10%, less than about 5%, less than about 1%, or less than about 0.1%, of the nickase activity of a wild-type Cas12b protein.

[0312] In some embodiments, the Cas12 protein includes RNA-guided endonucleases from the Cas12a/Cpf1 family that displays activity in mammalian cells. CRISPR from Prevotella and Francisella 1 (CRISPR/Cpf1) is a DNA editing technology analogous to the CRISPR/Cas9 system. Cpf1 is an RNA-guided endonuclease of a class II CRISPR/Cas system. This acquired immune mechanism is found in Prevotella and Francisella bacteria. Cpf1 genes are associated with the CRISPR locus, coding for an endonuclease that use a guide RNA to find and cleave viral DNA. Cpf1 is a smaller and simpler endonuclease than Cas9, overcoming some of the CRISPR/Cas9 system limitations. Unlike Cas9 nucleases, the result of Cpf1-mediated DNA cleavage is a double-strand break with a short 3′ overhang. Cpf1's staggered cleavage pattern can open up the possibility of directional gene transfer, analogous to traditional restriction enzyme cloning, which can increase the efficiency of gene editing. Like the Cas9 variants and orthologues described above, Cpf1 can also expand the number of sites that can be targeted by CRISPR to AT-rich regions or AT-rich genomes that lack the NGG PAM sites favored by SpCas9. The Cpf1 locus contains a mixed alpha/beta domain, a RuvC-I followed by a helical region, a RuvC-II and a zinc finger-like domain. The Cpf1 protein has a RuvC-like endonuclease domain that is similar to the RuvC domain of Cas9. Furthermore, Cpf1, unlike Cas9, does not have a HNH endonuclease domain, and the N-terminal of Cpf1 does not have the alpha-helical recognition lobe of Cas9. Cpf1 CRISPR-Cas domain architecture shows that Cpf1 is functionally unique, being classified as Class 2, type V CRISPR system. The Cpf1 loci encode Cas 1, Cas2, and Cas4 proteins are more similar to types I and III than type II systems. Functional Cpf1 does not require the trans-activating CRISPR RNA (tracrRNA), therefore, only CRISPR (crRNA) is required. This benefits genome editing because Cpf1 is not only smaller than Cas9, but also it has a smaller sgRNA molecule (approximately half as many nucleotides as Cas9). The Cpf1-crRNA complex cleaves target DNA or RNA by identification of a protospacer adjacent motif 5′-YTN-3′ or 5′-TTTN-3′ in contrast to the G-rich PAM targeted by Cas9. After identification of PAM, Cpf1 introduces a sticky-end-like DNA double-stranded break having an overhang of 4 or 5 nucleotides.

[0313] In some aspects of the present invention, a vector encodes a CRISPR enzyme that is mutated to with respect to a corresponding wild-type enzyme such that the mutated CRISPR enzyme lacks the ability to cleave one or both strands of a target polynucleotide containing a target sequence can be used. Cas12 can refer to a polypeptide with at least or at least about 50%, 60%, 70%, 80%, 90%, 91%, 92%, 93%, 94%, 95%, 96%, 97%, 98%, 99%, or 100% sequence identity and/or sequence homology to a wild type exemplary Cas12 polypeptide (e.g., Cas12 from Bacillus hisashii). Cas12 can refer to a polypeptide with at most or at most about 50%, 60%, 70%, 80%, 90%, 91%, 92%, 93%, 94%, 95%, 96%, 97%, 98%, 99%, or 100% sequence identity and/or sequence homology to a wild type exemplary Cas12 polypeptide (e.g., from Bacillus hisashii (BhCas12b), Bacillus sp. V3-13 (BvCas12b), and Alicyclobacillus acidiphilus (AaCas12b)). Cas12 can refer to the wild type or a modified form of the Cas12 protein that can comprise an amino acid change such as a deletion, insertion, substitution, variant, mutation, fusion, chimera, or any combination thereof.

### Nucleic Acid Programmable DNA Binding Proteins

[0314] Some aspects of the disclosure provide fusion proteins comprising domains that act as nucleic acid programmable DNA binding proteins, which may be used to guide a protein, such as a base editor, to a specific nucleic acid (e.g., DNA or RNA) sequence. In particular embodiments, a fusion protein comprises a nucleic acid programmable DNA binding protein domain and a deaminase domain. Non-limiting examples of nucleic acid programmable DNA binding proteins include, Cas9 (e.g., dCas9 and nCas9), Cas12a/Cpf1, Cas12b/C2c1, Cas12c/C2c3, Cas12d/CasY, Cas12e/CasX, Cas12g, Cas12h, and Cas12i. Non-limiting examples of Cas enzymes include Cas1, Cas1B, Cas2, Cas3, Cas4, Cas5, Cas5d, Cas5t, Cas5h, Cas5a, Cas6, Cas7, Cas8, Cas8a, Cas8b, Cas8c, Cas9 (also known as Csn1 or Csx12), Cas10, Cas10d, Cas12a/Cpf1, Cas12b/C2c1, Cas12c/C2c3, Cas12d/CasY, Cas12e/CasX, Cas12g, Cas12h, Cas12i, Csy1, Csy2, Csy3, Csy4, Cse1, Cse2, Cse3, Cse4, Cse5e, Csc1, Csc2, Csa5, Csn1, Csn2, Csm1, Csm2, Csm3, Csm4, Csm5, Csm6, Cmr1, Cmr3, Cmr4, Cmr5, Cmr6, Csb1, Csb2, Csb3, Csx17, Csx14, Csx10, Csx16, CsaX, Csx3, Csx1, Csx1S, Csx11, Csf1, Csf2, CsO, Csf4, Csd1, Csd2, Cst1, Cst2, Csh1, Csh2, Csa1, Csa2, Csa3, Csa4, Csa5, Type II Cas effector proteins, Type V Cas effector proteins, Type VI Cas effector proteins, CARF, DinG, homologues thereof, or modified or engineered versions thereof. Other nucleic acid programmable DNA binding proteins are also within the scope of this disclosure, although they may not be specifically listed in this disclosure. See, e.g., Makarova et al. “Classification and Nomenclature of CRISPR-Cas Systems: Where from Here?” CRISPR J. 2018 October; 1:325-336. doi: 10.1089/crispr.2018.0033; Yan et al., “Functionally diverse type V CRISPR-Cas systems” Science. 2019 Jan. 4; 363(6422):88-91. doi: 10.1126/science.aav7271, the entire contents of each are hereby incorporated by reference.

[0315] One example of a nucleic acid programmable DNA-binding protein that has different PAM specificity than Cas9 is Clustered Regularly Interspaced Short Palindromic Repeats from Prevotella and Francisella 1 (Cpf1). Similar to Cas9, Cpf1 is also a class 2 CRISPR effector. It has been shown that Cpf1 mediates robust DNA interference with features distinct from Cas9. Cpf1 is a single RNA-guided endonuclease lacking tracrRNA, and it utilizes a T-rich protospacer-adjacent motif (TTN, TTTN, or YTN). Moreover, Cpf1 cleaves DNA via a staggered DNA double-stranded break. Out of 16 Cpf1-family proteins, two enzymes from Acidaminococcus and Lachnospiraceae are shown to have efficient genome-editing activity in human cells. Cpf1 proteins are known in the art and have been described previously, for example Yamano et al., “Crystal structure of Cpf1 in complex with guide RNA and target DNA. “Cell (165) 2016, p. 949-962; the entire contents of which is hereby incorporated by reference.

[0316] Useful in the present compositions and methods are nuclease-inactive Cpf1 (dCpf1) variants that may be used as a guide nucleotide sequence-programmable DNA-binding protein domain. The Cpf1 protein has a RuvC-like endonuclease domain that is similar to the RuvC domain of Cas9 but does not have an HNH endonuclease domain, and the N-terminal of Cpf1 does not have the alfa-helical recognition lobe of Cas9. It was shown in Zetsche et al., Cell, 163, 759-771, 2015 (which is incorporated herein by reference) that, the RuvC-like domain of Cpf1 is responsible for cleaving both DNA strands and inactivation of the RuvC-like domain inactivates Cpf1 nuclease activity. For example, mutations corresponding to D917A, E1006A, or D1255A in Francisella novicida Cpf1 inactivate Cpf1 nuclease activity. In some embodiments, the dCpf1 of the present disclosure comprises mutations corresponding to D917A, E1006A, D1255A, D917A/E1006A, D917A/D1255A, E1006A/D1255A, or D917A/E1006A/D1255A. It is to be understood that any mutations, e.g., substitution mutations, deletions, or insertions that inactivate the RuvC domain of Cpf1, may be used in accordance with the present disclosure.

[0317] In some embodiments, the nucleic acid programmable DNA binding protein (napDNAbp) of any of the fusion proteins provided herein may be a Cpf1 protein. In some embodiments, the Cpf1 protein is a Cpf1 nickase (nCpf1). In some embodiments, the Cpf1 protein is a nuclease inactive Cpf1 (dCpf1). In some embodiments, the Cpf1, the nCpf1, or the dCpf1 comprises an amino acid sequence that is at least 85%, at least 90%, at least 91%, at least 92%, at least 93%, at least 94%, at least 95%, at least 96%, at least 97%, at least 98%, at least 99%, or at least 99.5% identical to a Cpf1 sequence disclosed herein. In some embodiments, the dCpf1 comprises an amino acid sequence that is at least 85%, at least 90%, at least 91%, at least 92%, at least 93%, at least 94%, at least 95%, at least 96%, at least 97%, at least 98%, at least 99%, or at ease 99.5% identical to a Cpf1 sequence disclosed herein, and comprises mutations corresponding to D917A, E1006A, D1255A, D917A/E1006A, D917A/D1255A, E1006A/D1255A, or D917A/E1006A/D1255A. It should be appreciated that Cpf1 from other bacterial species may also be used in accordance with the present disclosure.

Wild type Francisella novicida Cpf1 (D917, E1006, and D1255 are bolded and underlined):

(SEQ ID NO: 80)
MSIYQEFVNKYSLSKTLRFELIPQGKTLENIKARGLILDDEKRAKDYKKA
KQIIDKYHQFFIEEILSSVCISEDLLQNYSDVYFKLKKSDDDNLQKDFKS
AKDTIKKQISEYIKDSEKFKNLFNQNLIDAKKGQESDLILWLKQSKDNGI
ELFKANSDITDIDEALEIIKSFKGWTTYFKGFHENRKNVYSSNDIPTSII
YRIVDDNLPKFLENKAKYESLKDKAPEAINYEQIKKDLAEELTFDIDYKT
SEVNQRVFSLDEVFEIANFNNYLNQSGITKFNTIIGGKFVNGENTKRKGI
NEYINLYSQQINDKTLKKYKMSVLFKQILSDTESKSFVIDKLEDDSDVVT
TMQSFYEQIAAFKTVEEKSIKETLSLLFDDLKAQKLDLSKIYFKNDKSLT
DLSQQVFDDYSVIGTAVLEYITQQIAPKNLDNPSKKEQELIAKKTEKAKY
LSLETIKLALEEFNKHRDIDKQCRFEEILANFAAIPMIFDEIAQNKDNLA
QISIKYQNQGKKDLLQASAEDDVKAIKDLLDQTNNLLHKLKIFHISQSED
KANILDKDEHFYLVFEECYFELANIVPLYNKIRNYITQKPYSDEKFKLNF
ENSTLANGWDKNKEPDNTAILFIKDDKYYLGVMNKKNNKIFDDKAIKENK
GEGYKKIVYKLLPGANKMLPKVFFSAKSIKFYNPSEDILRIRNHSTHTKN
GSPQKGYEKFEFNIEDCRKFIDFYKQSISKHPEWKDFGFRFSDTQRYNSI
DEFYREVENQGYKLTFENISESYIDSVVNQGKLYLFQIYNKDFSAYSKGR
PNLHTLYWKALFDERNLQDVVYKLNGEAELFYRKQSIPKKITHPAKEAIA
NKNKDNPKKESVFEYDLIKDKRFTEDKFFFHCPITINFKSSGANKFNDEI
NLLLKEKANDVHILSIDRGERHLAYYTLVDGKGNIIKQDTFNIIGNDRMK
TNYHDKLAAIEKDRDSARKDWKKINNIKEMKEGYLSQVVHEIAKLVIEYN
AIVVFEDLNFGFKRGRFKVEKQVYQKLEKMLIEKLNYLVFKDNEFDKTGG
VLRAYQLTAPFETFKKMGKQTGIIYYVPAGFTSKICPVTGFVNQLYPKYE
SVSKSQEFFSKFDKICYNLDKGYFEFSFDYKNFGDKAAKGKWTIASFGSR
LINFRNSDKNHNWDTREVYPTKELEKLLKDYSIEYGHGECIKAAICGESD
KKFFAKLTSVLNTILQMRNSKTGTELDYLISPVADVNGNFFDSRQAPKNM
PQDADANGAYHIGLKGLMLLGRIKNNQEGKKLNLVIKNEEYFEFVQNRNN

Francisella novicida Cpf1 D917A (A917, E1006, and D1255 are bolded and underlined):

(SEQ ID NO: 81)
MSIYQEFVNKYSLSKTLRFELIPQGKTLENIKARGLILDDEKRAKDYKKA
KQIIDKYHQFFIEEILSSVCISEDLLQNYSDVYFKLKKSDDDNLQKDFKS
AKDTIKKQISEYIKDSEKFKNLFNQNLIDAKKGQESDLILWLKQSKDNGI
ELFKANSDITDIDEALEIIKSFKGWTTYFKGFHENRKNVYSSNDIPTSII
YRIVDDNLPKFLENKAKYESLKDKAPEAINYEQIKKDLAEELTFDIDYKT
SEVNQRVFSLDEVFEIANFNNYLNQSGITKFNTIIGGKFVNGENTKRKGI
NEYINLYSQQINDKTLKKYKMSVLFKQILSDTESKSFVIDKLEDDSDVVT
TMQSFYEQIAAFKTVEEKSIKETLSLLFDDLKAQKLDLSKIYFKNDKSLT
DLSQQVFDDYSVIGTAVLEYITQQIAPKNLDNPSKKEQELIAKKTEKAKY
LSLETIKLALEEFNKHRDIDKQCRFEEILANFAAIPMIFDEIAQNKDNLA
QISIKYQNQGKKDLLQASAEDDVKAIKDLLDQTNNLLHKLKIFHISQSED
KANILDKDEHFYLVFEECYFELANIVPLYNKIRNYITQKPYSDEKFKLNF
ENSTLANGWDKNKEPDNTAILFIKDDKYYLGVMNKKNNKIFDDKAIKENK
GEGYKKIVYKLLPGANKMLPKVFFSAKSIKFYNPSEDILRIRNHSTHTKN
GSPQKGYEKFEFNIEDCRKFIDFYKQSISKHPEWKDFGFRFSDTQRYNSI
DEFYREVENQGYKLTFENISESYIDSVVNQGKLYLFQIYNKDFSAYSKGR
PNLHTLYWKALFDERNLQDVVYKLNGEAELFYRKQSIPKKITHPAKEAIA
NKNKDNPKKESVFEYDLIKDKRFTEDKFFFHCPITINFKSSGANKFNDEI
NLLLKEKANDVHILSIARGERHLAYYTLVDGKGNIIKQDTFNIIGNDRMK
TNYHDKLAAIEKDRDSARKDWKKINNIKEMKEGYLSQVVHEIAKLVIEYN
AIVVFEDLNFGFKRGRFKVEKQVYQKLEKMLIEKLNYLVFKDNEFDKTGG
VLRAYQLTAPFETFKKMGKQTGIIYYVPAGFTSKICPVTGFVNQLYPKYE
SVSKSQEFFSKFDKICYNLDKGYFEFSFDYKNFGDKAAKGKWTIASFGSR
LINFRNSDKNHNWDTREVYPTKELEKLLKDYSIEYGHGECIKAAICGESD
KKFFAKLTSVLNTILQMRNSKTGTELDYLISPVADVNGNFFDSRQAPKNM
PQDADANGAYHIGLKGLMLLGRIKNNQEGKKLNLVIKNEEYFEFVQNRNN

Francisella novicida Cpf1 E1006A (D917, A1006, and D1255 are bolded and underlined):

(SEQ ID NO: 82)
MSIYQEFVNKYSLSKTLRFELIPQGKTLENIKARGLILDDEKRAKDYKKA
KQIIDKYHQFFIEEILSSVCISEDLLQNYSDVYFKLKKSDDDNLQKDFKS
AKDTIKKQISEYIKDSEKFKNLFNQNLIDAKKGQESDLILWLKQSKDNGI
ELFKANSDITDIDEALEIIKSFKGWTTYFKGFHENRKNVYSSNDIPTSII
YRIVDDNLPKFLENKAKYESLKDKAPEAINYEQIKKDLAEELTFDIDYKT
SEVNQRVFSLDEVFEIANFNNYLNQSGITKFNTIIGGKFVNGENTKRKGI
NEYINLYSQQINDKTLKKYKMSVLFKQILSDTESKSFVIDKLEDDSDVVT
TMQSFYEQIAAFKTVEEKSIKETLSLLFDDLKAQKLDLSKIYFKNDKSLT
DLSQQVFDDYSVIGTAVLEYITQQIAPKNLDNPSKKEQELIAKKTEKAKY
LSLETIKLALEEFNKHRDIDKQCRFEEILANFAAIPMIFDEIAQNKDNLA
QISIKYQNQGKKDLLQASAEDDVKAIKDLLDQTNNLLHKLKIFHISQSED
KANILDKDEHFYLVFEECYFELANIVPLYNKIRNYITQKPYSDEKFKLNF
ENSTLANGWDKNKEPDNTAILFIKDDKYYLGVMNKKNNKIFDDKAIKENK
GEGYKKIVYKLLPGANKMLPKVFFSAKSIKFYNPSEDILRIRNHSTHTKN
GSPQKGYEKFEFNIEDCRKFIDFYKQSISKHPEWKDFGFRFSDIQRYNSI
DEFYREVENQGYKLTFENISESYIDSVVNQGKLYLFQIYNKDFSAYSKGR
PNLHTLYWKALFDERNLQDVVYKLNGEAELFYRKQSIPKKITHPAKEAIA
NKNKDNPKKESVFEYDLIKDKRFTEDKFFFHCPITINFKSSGANKFNDEI
NLLLKEKANDVHILSIDRGERHLAYYTLVDGKGNIIKQDTFNIIGNDRMK
TNYHDKLAAIEKDRDSARKDWKKINNIKEMKEGYLSQVVHEIAKLVIEYN
AIVVFADLNFGFKRGRFKVEKQVYQKLEKMLIEKLNYLVFKDNEFDKTGG
VLRAYQLTAPFETFKKMGKQTGIIYYVPAGFTSKICPVTGFVNQLYPKYE
SVSKSQEFFSKFDKICYNLDKGYFEFSFDYKNFGDKAAKGKWTIASFGSR
LINFRNSDKNHNWDTREVYPTKELEKLLKDYSIEYGHGECIKAAICGESD
KKFFAKLTSVLNTILQMRNSKTGTELDYLISPVADVNGNFFDSRQAPKNM
PQDADANGAYHIGLKGLMLLGRIKNNQEGKKLNLVIKNEEYFEFVQNRNN

Francisella novicida Cpf1 D1255A (D917, E1006, and A1255 are bolded and underlined)

(SEQ ID NO: 83)
MSIYQEFVNKYSLSKTLRFELIPQGKTLENIKARGLILDDEKRAKDYKKA
KQIIDKYHQFFIEEILSSVCISEDLLQNYSDVYFKLKKSDDDNLQKDFKS
AKDTIKKQISEYIKDSEKFKNLFNQNLIDAKKGQESDLILWLKQSKDNGI
ELFKANSDITDIDEALEIIKSFKGWTTYFKGFHENRKNVYSSNDIPTSII
YRIVDDNLPKFLENKAKYESLKDKAPEAINYEQIKKDLAEELTFDIDYKT
SEVNQRVFSLDEVFEIANFNNYLNQSGITKFNTIIGGKFVNGENTKRKGI
NEYINLYSQQINDKTLKKYKMSVLFKQILSDTESKSFVIDKLEDDSDVVT
TMQSFYEQIAAFKTVEEKSIKETLSLLFDDLKAQKLDLSKIYFKNDKSLT
DLSQQVFDDYSVIGTAVLEYITQQIAPKNLDNPSKKEQELIAKKTEKAKY
LSLETIKLALEEFNKHRDIDKQCRFEEILANFAAIPMIFDEIAQNKDNLA
QISIKYQNQGKKDLLQASAEDDVKAIKDLLDQTNNLLHKLKIFHISQSED
KANILDKDEHFYLVFEECYFELANIVPLYNKIRNYITQKPYSDEKFKLNF
ENSTLANGWDKNKEPDNTAILFIKDDKYYLGVMNKKNNKIFDDKAIKENK
GEGYKKIVYKLLPGANKMLPKVFFSAKSIKFYNPSEDILRIRNHSTHTKN
GSPQKGYEKFEFNIEDCRKFIDFYKQSISKHPEWKDFGFRFSDTQRYNSI
DEFYREVENQGYKLTFENISESYIDSVVNQGKLYLFQIYNKDFSAYSKGR
PNLHTLYWKALFDERNLQDVVYKLNGEAELFYRKQSIPKKITHPAKEAIA
NKNKDNPKKESVFEYDLIKDKRFTEDKFFFHCPITINFKSSGANKFNDEI
NLLLKEKANDVHILSIDRGERHLAYYTLVDGKGNIIKQDTFNIIGNDRMK
TNYHDKLAAIEKDRDSARKDWKKINNIKEMKEGYLSQVVHEIAKLVIEYN
AIVVFEDLNFGFKRGRFKVEKQVYQKLEKMLIEKLNYLVFKDNEFDKTGG
VLRAYQLTAPFETFKKMGKQTGIIYYVPAGFTSKICPVTGFVNQLYPKYE
SVSKSQEFFSKFDKICYNLDKGYFEFSFDYKNFGDKAAKGKWTIASFGSR
LINFRNSDKNHNWDTREVYPTKELEKLLKDYSIEYGHGECIKAAICGESD
KKFFAKLTSVLNTILQMRNSKTGTELDYLISPVADVNGNFFDSRQAPKNM
PQDAAANGAYHIGLKGLMLLGRIKNNQEGKKLNLVIKNEEYFEFVQNRNN

Francisella novicida Cpf1 D917A/E1006A (A917, A1006, and D1255 are bolded and underlined):

(SEQ ID NO: 84)
MSIYQEFVNKYSLSKTLRFELIPQGKTLENIKARGLILDDEKRAKDYKKA
KQIIDKYHQFFIEEILSSVCISEDLLQNYSDVYFKLKKSDDDNLQKDFKS
AKDTIKKQISEYIKDSEKFKNLFNQNLIDAKKGQESDLILWLKQSKDNGI
ELFKANSDITDIDEALEIIKSFKGWTTYFKGFHENRKNVYSSNDIPTSII
YRIVDDNLPKFLENKAKYESLKDKAPEAINYEQIKKDLAEELTFDIDYKT
SEVNQRVFSLDEVFEIANFNNYLNQSGITKFNTIIGGKFVNGENTKRKGI
NEYINLYSQQINDKTLKKYKMSVLFKQILSDTESKSFVIDKLEDDSDVVT
TMQSFYEQIAAFKTVEEKSIKETLSLLFDDLKAQKLDLSKIYFKNDKSLT
DLSQQVFDDYSVIGTAVLEYITQQIAPKNLDNPSKKEQELIAKKTEKAKY
LSLETIKLALEEFNKHRDIDKQCRFEEILANFAAIPMIFDEIAQNKDNLA
QISIKYQNQGKKDLLQASAEDDVKAIKDLLDQTNNLLHKLKIFHISQSED
KANILDKDEHFYLVFEECYFELANIVPLYNKIRNYITQKPYSDEKFKLNF
ENSTLANGWDKNKEPDNTAILFIKDDKYYLGVMNKKNNKIFDDKAIKENK
GEGYKKIVYKLLPGANKMLPKVFFSAKSIKFYNPSEDILRIRNHSTHTKN
GSPQKGYEKFEFNIEDCRKFIDFYKQSISKHPEWKDFGFRFSDTQRYNSI
DEFYREVENQGYKLTFENISESYIDSVVNQGKLYLFQIYNKDFSAYSKGR
PNLHTLYWKALFDERNLQDVVYKLNGEAELFYRKQSIPKKITHPAKEAIA
NKNKDNPKKESVFEYDLIKDKRFTEDKFFFHCPITINFKSSGANKFNDEI
NLLLKEKANDVHILSIARGERHLAYYTLVDGKGNIIKQDTFNIIGNDRMK
TNYHDKLAAIEKDRDSARKDWKKINNIKEMKEGYLSQVVHEIAKLVIEYN
AIVVFADLNFGFKRGRFKVEKQVYQKLEKMLIEKLNYLVFKDNEFDKTGG
VLRAYQLTAPFETFKKMGKQTGIIYYVPAGFTSKICPVTGFVNQLYPKYE
SVSKSQEFFSKFDKICYNLDKGYFEFSFDYKNFGDKAAKGKWTIASFGSR
LINFRNSDKNHNWDTREVYPTKELEKLLKDYSIEYGHGECIKAAICGESD
KKFFAKLTSVLNTILQMRNSKTGTELDYLISPVADVNGNFFDSRQAPKNM
PQDADANGAYHIGLKGLMLLGRIKNNQEGKKLNLVIKNEEYFEFVQNRNN

Francisella novicida Cpf1 D917A/D1255A (A917, E1006, and A1255 are bolded and underlined):

(SEQ ID NO: 85)
MSIYQEFVNKYSLSKTLRFELIPQGKTLENIKARGLILDDEKRAKDYKKA
KQIIDKYHQFFIEEILSSVCISEDLLQNYSDVYFKLKKSDDDNLQKDFKS
AKDTIKKQISEYIKDSEKFKNLFNQNLIDAKKGQESDLILWLKQSKDNGI
ELFKANSDITDIDEALEIIKSFKGWTTYFKGFHENRKNVYSSNDIPTSII
YRIVDDNLPKFLENKAKYESLKDKAPEAINYEQIKKDLAEELTFDIDYKT
SEVNQRVFSLDEVFEIANFNNYLNQSGITKFNTIIGGKFVNGENTKRKGI
NEYINLYSQQINDKTLKKYKMSVLFKQILSDTESKSFVIDKLEDDSDVVT
TMQSFYEQIAAFKTVEEKSIKETLSLLFDDLKAQKLDLSKIYFKNDKSLT
DLSQQVFDDYSVIGTAVLEYITQQIAPKNLDNPSKKEQELIAKKTEKAKY
LSLETIKLALEEFNKHRDIDKQCRFEEILANFAAIPMIFDEIAQNKDNLA
QISIKYQNQGKKDLLQASAEDDVKAIKDLLDQTNNLLHKLKIFHISQSED
KANILDKDEHFYLVFEECYFELANIVPLYNKIRNYITQKPYSDEKFKLNF
ENSTLANGWDKNKEPDNTAILFIKDDKYYLGVMNKKNNKIFDDKAIKENK
GEGYKKIVYKLLPGANKMLPKVFFSAKSIKFYNPSEDILRIRNHSTHTKN
GSPQKGYEKFEFNIEDCRKFIDFYKQSISKHPEWKDFGFRFSDTQRYNSI
DEFYREVENQGYKLTFENISESYIDSVVNQGKLYLFQIYNKDFSAYSKGR
PNLHTLYWKALFDERNLQDVVYKLNGEAELFYRKQSIPKKITHPAKEAIA
NKNKDNPKKESVFEYDLIKDKRFTEDKFFFHCPITINFKSSGANKFNDEI
NLLLKEKANDVHILSIARGERHLAYYTLVDGKGNIIKQDTFNIIGNDRMK
TNYHDKLAAIEKDRDSARKDWKKINNIKEMKEGYLSQVVHEIAKLVIEYN
AIVVFEDLNFGFKRGRFKVEKQVYQKLEKMLIEKLNYLVFKDNEFDKTGG
VLRAYQLTAPFETFKKMGKQTGIIYYVPAGFTSKICPVTGFVNQLYPKYE
SVSKSQEFFSKFDKICYNLDKGYFEFSFDYKNFGDKAAKGKWTIASFGSR
LINFRNSDKNHNWDTREVYPTKELEKLLKDYSIEYGHGECIKAAICGESD
KKFFAKLTSVLNTILQMRNSKTGTELDYLISPVADVNGNFFDSRQAPKNM
PQDAAANGAYHIGLKGLMLLGRIKNNQEGKKLNLVIKNEEYFEFVQNRNN

Francisella novicida Cpf1 E1006A/D1255A (D917, A1006, and A1255 are bolded and underlined):

(SEQ ID NO: 86)
MSIYQEFVNKYSLSKTLRFELIPQGKTLENIKARGLILDDEKRAKDYKKA
KQIIDKYHQFFIEEILSSVCISEDLLQNYSDVYFKLKKSDDDNLQKDFKS
AKDTIKKQISEYIKDSEKFKNLFNQNLIDAKKGQESDLILWLKQSKDNGI
ELFKANSDITDIDEALEIIKSFKGWTTYFKGFHENRKNVYSSNDIPTSII
YRIVDDNLPKFLENKAKYESLKDKAPEAINYEQIKKDLAEELTFDIDYKT
SEVNQRVFSLDEVFEIANFNNYLNQSGITKFNTIIGGKFVNGENTKRKGI
NEYINLYSQQINDKTLKKYKMSVLFKQILSDTESKSFVIDKLEDDSDVVT
TMQSFYEQIAAFKTVEEKSIKETLSLLFDDLKAQKLDLSKIYFKNDKSLT
DLSQQVFDDYSVIGTAVLEYITQQIAPKNLDNPSKKEQELIAKKTEKAKY
LSLETIKLALEEFNKHRDIDKQCRFEEILANFAAIPMIFDEIAQNKDNLA
QISIKYQNQGKKDLLQASAEDDVKAIKDLLDQTNNLLHKLKIFHISQSED
KANILDKDEHFYLVFEECYFELANIVPLYNKIRNYITQKPYSDEKFKLNF
ENSTLANGWDKNKEPDNTAILFIKDDKYYLGVMNKKNNKIFDDKAIKENK
GEGYKKIVYKLLPGANKMLPKVFFSAKSIKFYNPSEDILRIRNHSTHTKN
GSPQKGYEKFEFNIEDCRKFIDFYKQSISKHPEWKDFGFRFSDTQRYNSI
DEFYREVENQGYKLTFENISESYIDSVVNQGKLYLFQIYNKDFSAYSKGR
PNLHTLYWKALFDERNLQDVVYKLNGEAELFYRKQSIPKKITHPAKEAIA
NKNKDNPKKESVFEYDLIKDKRFTEDKFFFHCPITINFKSSGANKFNDEI
NLLLKEKANDVHILSIDRGERHLAYYTLVDGKGNIIKQDTFNIIGNDRMK
TNYHDKLAAIEKDRDSARKDWKKINNIKEMKEGYLSQVVHEIAKLVIEYN
AIVVFADLNFGFKRGRFKVEKQVYQKLEKMLIEKLNYLVFKDNEFDKTGG
VLRAYQLTAPFETFKKMGKQTGIIYYVPAGFTSKICPVTGFVNQLYPKYE
SVSKSQEFFSKFDKICYNLDKGYFEFSFDYKNFGDKAAKGKWTIASFGSR
LINFRNSDKNHNWDTREVYPTKELEKLLKDYSIEYGHGECIKAAICGESD
KKFFAKLTSVLNTILQMRNSKTGTELDYLISPVADVNGNFFDSRQAPKNM
PQDAAANGAYHIGLKGLMLLGRIKNNQEGKKLNLVIKNEEYFEFVQNRNN

Francisella novicida Cpf1 D917A/E1006A/D1255A (A917, A1006, and A1255 are bolded and underlined):

(SEQ ID NO: 87)
MSIYQEFVNKYSLSKTLRFELIPQGKTLENIKARGLILDDEKRAKDYKKA
KQIIDKYHQFFIEEILSSVCISEDLLQNYSDVYFKLKKSDDDNLQKDFKS
AKDTIKKQISEYIKDSEKFKNLFNQNLIDAKKGQESDLILWLKQSKDNGI
ELFKANSDITDIDEALEIIKSFKGWTTYFKGFHENRKNVYSSNDIPTSII
YRIVDDNLPKFLENKAKYESLKDKAPEAINYEQIKKDLAEELTFDIDYKT
SEVNQRVFSLDEVFEIANFNNYLNQSGITKFNTIIGGKFVNGENTKRKGI
NEYINLYSQQINDKTLKKYKMSVLFKQILSDTESKSFVIDKLEDDSDVVT
TMQSFYEQIAAFKTVEEKSIKETLSLLFDDLKAQKLDLSKIYFKNDKSLT
DLSQQVFDDYSVIGTAVLEYITQQIAPKNLDNPSKKEQELIAKKTEKAKY
LSLETIKLALEEFNKHRDIDKQCRFEEILANFAAIPMIFDEIAQNKDNLA
QISIKYQNQGKKDLLQASAEDDVKAIKDLLDQTNNLLHKLKIFHISQSED
KANILDKDEHFYLVFEECYFELANIVPLYNKIRNYITQKPYSDEKFKLNF
ENSTLANGWDKNKEPDNTAILFIKDDKYYLGVMNKKNNKIFDDKAIKENK
GEGYKKIVYKLLPGANKMLPKVFFSAKSIKFYNPSEDILRIRNHSTHTKN
GSPQKGYEKFEFNIEDCRKFIDFYKQSISKHPEWKDFGFRFSDTQRYNSI
DEFYREVENQGYKLTFENISESYIDSVVNQGKLYLFQIYNKDFSAYSKGR
PNLHTLYWKALFDERNLQDVVYKLNGEAELFYRKQSIPKKITHPAKEAIA
NKNKDNPKKESVFEYDLIKDKRFTEDKFFFHCPITINFKSSGANKFNDEI
NLLLKEKANDVHILSIARGERHLAYYTLVDGKGNIIKQDTFNIIGNDRMK
TNYHDKLAAIEKDRDSARKDWKKINNIKEMKEGYLSQVVHEIAKLVIEYN
AIVVFADLNFGFKRGRFKVEKQVYQKLEKMLIEKLNYLVFKDNEFDKTGG
VLRAYQLTAPFETFKKMGKQTGIIYYVPAGFTSKICPVTGFVNQLYPKYE
SVSKSQEFFSKFDKICYNLDKGYFEFSFDYKNFGDKAAKGKWTIASFGSR
LINFRNSDKNHNWDTREVYPTKELEKLLKDYSIEYGHGECIKAAICGESD
KKFFAKLTSVLNTILQMRNSKTGTELDYLISPVADVNGNFFDSRQAPKNM
PQDAAANGAYHIGLKGLMLLGRIKNNQEGKKLNLVIKNEEYFEFVQNRNN

[0318] In some embodiments, one of the Cas9 domains present in the fusion protein may be replaced with a guide nucleotide sequence-programmable DNA-binding protein domain that has no requirements for a PAM sequence.

[0319] In some embodiments, the Cas9 domain is a Cas9 domain from Staphylococcus aureus (SaCas9). In some embodiments, the SaCas9 domain is a nuclease active SaCas9, a nuclease inactive SaCas9 (SaCas9d), or a SaCas9 nickase (SaCas9n). In some embodiments, the SaCas9 comprises a N579A mutation, or a corresponding mutation in any of the amino acid sequences provided herein.

[0320] In some embodiments, the SaCas9 domain, the SaCas9d domain, or the SaCas9n domain can bind to a nucleic acid sequence having a non-canonical PAM. In some embodiments, the SaCas9 domain, the SaCas9d domain, or the SaCas9n domain can bind to a nucleic acid sequence having a NNGRRT or a NNGRRT PAM sequence. In some embodiments, the SaCas9 domain comprises one or more of a E781X, a N967X, and a R1014X mutation, or a corresponding mutation in any of the amino acid sequences provided herein, wherein X is any amino acid. In some embodiments, the SaCas9 domain comprises one or more of a E781K, a N967K, and a R1014H mutation, or one or more corresponding mutation in any of the amino acid sequences provided herein. In some embodiments, the SaCas9 domain comprises a E781K, a N967K, or a R1014H mutation, or corresponding mutations in any of the amino acid sequences provided herein.

### Exemplary SaCas9 Sequence:

(SEQ ID NO: 88)
KRNYILGLDIGITSVGYGIIDYETRDVIDAGVRLFKEANVENNEGRRSKR
GARRLKRRRRHRIQRVKKLLFDYNLLTDHSELSGINPYEARVKGLSQKLS
EEEFSAALLHLAKRRGVHNVNEVEEDTGNELSTKEQISRNSKALEEKYVA
ELQLERLKKDGEVRGSINRFKTSDYVKEAKQLLKVQKAYHQLDQSFIDTY
IDLLETRRTYYEGPGEGSPFGWKDIKEWYEMLMGHCTYFPEELRSVKYAY
NADLYNALNDLNNLVITRDENEKLEYYEKFQIIENVFKQKKKPTLKQIAK
EILVNEEDIKGYRVTSTGKPEFTNLKVYHDIKDITARKEIIENAELLDQI
AKILTIYQSSEDIQEELTNLNSELTQEEIEQISNLKGYTGTHNLSLKAIN
LILDELWHTNDNQIAIFNRLKLVPKKVDLSQQKEIPTTLVDDFILSPVVK
RSFIQSIKVINAIIKKYGLPNDIIIELAREKNSKDAQKMINEMQKRNRQT
NERIEEIIRTTGKENAKYLIEKIKLHDMQEGKCLYSLEAIPLEDLLNNPF
NYEVDHIIPRSVSFDNSFNNKVLVKQEENSKKGNRTPFQYLSSSDSKISY
ETFKKHILNLAKGKGRISKTKKEYLLEERDINRFSVQKDFINRNLVDTRY
ATRGLMNLLRSYFRVNNLDVKVKSINGGFTSFLRRKWKFKKERNKGYKHH
AEDALIIANADFIFKEWKKLDKAKKVMENQMFEEKQAESMPEIETEQEYK
EIFITPHQIKHIKDFKDYKYSHRVDKKPNRELINDTLYSTRKDDKGNTLI
VNNLNGLYDKDNDKLKKLINKSPEKLLMYHHDPQTYQKLKLIMEQYGDEK
NPLYKYYEETGNYLTKYSKKDNGPVIKKIKYYGNKLNAHLDITDDYPNSR
NKVVKLSLKPYRFDVYLDNGVYKFVTVKNLDVIKKENYYEVNSKCYEEAK
KLKKISNQAEFIASFYNNDLIKINGELYRVIGVNNDLLNRIEVNMIDITY
REYLENMNDKRPPRIIKTIASKTQSIKKYSTDILGNLYEVKSKKHPQIIK
KG

[0322] Residue N579 above, which is underlined and in bold, may be mutated (e.g., to a A579) to yield a SaCas9 nickase.

### Exemplary SaCas9n Sequence:

(SEQ ID NO: 89)
KRNYILGLDIGITSVGYGIIDYETRDVIDAGVRLFKEANVENNEGRRSKR
GARRLKRRRRHRIQRVKKLLFDYNLLTDHSELSGINPYEARVKGLSQKLS
EEEFSAALLHLAKRRGVHNVNEVEEDTGNELSTKEQISRNSKALEEKYVA
ELQLERLKKDGEVRGSINRFKTSDYVKEAKQLLKVQKAYHQLDQSFIDTY
IDLLETRRTYYEGPGEGSPFGWKDIKEWYEMLMGHCTYFPEELRSVKYAY
NADLYNALNDLNNLVITRDENEKLEYYEKFQIIENVFKQKKKPTLKQIAK
EILVNEEDIKGYRVTSTGKPEFTNLKVYHDIKDITARKEIIENAELLDQI
AKILTIYQSSEDIQEELTNLNSELTQEEIEQISNLKGYTGTHNLSLKAIN
LILDELWHTNDNQIAIFNRLKLVPKKVDLSQQKEIPTTLVDDFILSPVVK
RSFIQSIKVINAIIKKYGLPNDIIIELAREKNSKDAQKMINEMQKRNRQT
NERIEEIIRTTGKENAKYLIEKIKLHDMQEGKCLYSLEAIPLEDLLNNPF
NYEVDHIIPRSVSFDNSFNNKVLVKQEEASKKGNRTPFQYLSSSDSKISY
ETFKKHILNLAKGKGRISKTKKEYLLEERDINRFSVQKDFINRNLVDTRY
ATRGLMNLLRSYFRVNNLDVKVKSINGGFTSFLRRKWKFKKERNKGYKHH
AEDALIIANADFIFKEWKKLDKAKKVMENQMFEEKQAESMPEIETEQEYK
EIFITPHQIKHIKDFKDYKYSHRVDKKPNRELINDTLYSTRKDDKGNTLI
VNNLNGLYDKDNDKLKKLINKSPEKLLMYHHDPQTYQKLKLIMEQYGDEK
NPLYKYYEETGNYLTKYSKKDNGPVIKKIKYYGNKLNAHLDITDDYPNSR
NKVVKLSLKPYRFDVYLDNGVYKFVTVKNLDVIKKENYYEVNSKCYEEAK
KLKKISNQAEFIASFYNNDLIKINGELYRVIGVNNDLLNRIEVNMIDITY
REYLENMNDKRPPRIIKTIASKTQSIKKYSTDILGNLYEVKSKKHPQIIK
KG

[0324] Residue A579 above, which can be mutated from N579 to yield a SaCas9 nickase, is underlined and in bold.

### Exemplary SaKKH Cas9:

(SEQ ID NO: 90)
KRNYILGLDIGITSVGYGIIDYETRDVIDAGVRLFKEANVENNEGRRSKR
GARRLKRRRRHRIQRVKKLLFDYNLLTDHSELSGINPYEARVKGLSQKLS
EEEFSAALLHLAKRRGVHNVNEVEEDTGNELSTKEQISRNSKALEEKYVA
ELQLERLKKDGEVRGSINRFKTSDYVKEAKQLLKVQKAYHQLDQSFIDTY
IDLLETRRTYYEGPGEGSPFGWKDIKEWYEMLMGHCTYFPEELRSVKYAY
NADLYNALNDLNNLVITRDENEKLEYYEKFQIIENVFKQKKKPTLKQIAK
EILVNEEDIKGYRVTSTGKPEFTNLKVYHDIKDITARKEIIENAELLDQI
AKILTIYQSSEDIQEELTNLNSELTQEEIEQISNLKGYTGTHNLSLKAIN
LILDELWHTNDNQIAIFNRLKLVPKKVDLSQQKEIPTTLVDDFILSPVVK
RSFIQSIKVINAIIKKYGLPNDIIIELAREKNSKDAQKMINEMQKRNRQT
NERIEEIIRTTGKENAKYLIEKIKLHDMQEGKCLYSLEAIPLEDLLNNPF
NYEVDHIIPRSVSFDNSFNNKVLVKQEEASKKGNRTPFQYLSSSDSKISY
ETFKKHILNLAKGKGRISKTKKEYLLEERDINRFSVQKDFINRNLVDTRY
ATRGLMNLLRSYFRVNNLDVKVKSINGGFTSFLRRKWKFKKERNKGYKHH
AEDALIIANADFIFKEWKKLDKAKKVMENQMFEEKQAESMPEIETEQEYK
EIFITPHQIKHIKDFKDYKYSHRVDKKPNRKLINDTLYSTRKDDKGNTLI
VNNLNGLYDKDNDKLKKLINKSPEKLLMYHHDPQTYQKLKLIMEQYGDEK
NPLYKYYEETGNYLTKYSKKDNGPVIKKIKYYGNKLNAHLDITDDYPNSR
NKVVKLSLKPYRFDVYLDNGVYKFVTVKNLDVIKKENYYEVNSKCYEEAK
KLKKISNQAEFIASFYKNDLIKINGELYRVIGVNNDLLNRIEVNMIDITY
REYLENMNDKRPPHIIKTIASKTQSIKKYSTDILGNLYEVKSKKHPQIIK
KG.

[0326] Residue A579 above, which can be mutated from N579 to yield a SaCas9 nickase, is underlined and in bold. Residues K781, K967, and H1014 above, which can be mutated from E781, N967, and R1014 to yield a SaKKH Cas9 are underlined and in italics.

[0327] In some embodiments, the napDNAbp is a circular permutant. In the following sequences, the plain text denotes an adenosine deaminase sequence, bold sequence indicates sequence derived from Cas9, the italics sequence denotes a linker sequence, and the underlined sequence denotes a bipartite nuclear localization sequence.

CP5 (with MSP “NGC” PID and “D10A” Nickase):

(SEQ ID NO: 3)
EIGKATAKYFFYSNIMNFFKTEITLANGEIRKRPLIETNGETGEIVWDKG
RDFATVRKVLSMPQVNIVKKTEVQTGGFSKESILPKRNSDKLIARKKDWD
PKKYGGFMQPTVAYSVLVVAKVEKGKSKKLKSVKELLGITIMERSSFEKN
PIDFLEAKGYKEVKKDLIIKLPKYSLFELENGRKRMLASAKFLQKGNELA
LPSKYVNFLYLASHYEKLKGSPEDNEQKQLFVEQHKHYLDEIIEQISEFS
KRVILADANLDKVLSAYNKHRDKPIREQAENIIHLFTLTNLGAPRAFKYF
DTTIARKEYRSTKEVLDATLIHQSITGLYETRIDLSQLGGDGGSGGSGGS
GGSGGSGGSGGMDKKYSIGLAIGTNSVGWAVITDEYKVPSKKFKVLGNTD
RHSIKKNLIGALLFDSGETAEATRLKRTARRRYTRRKNRICYLQEIFSNE
MAKVDDSFFHRLEESFLVEEDKKHERHPIFGNIVDEVAYHEKYPTIYHLR
KKLVDSTDKADLRLIYLALAHMIKFRGHFLIEGDLNPDNSDVDKLFIQLV
QTYNQLFEENPINASGVDAKAILSARLSKSRRLENLIAQLPGEKKNGLFG
NLIALSLGLTPNFKSNFDLAEDAKLQLSKDTYDDDLDNLLAQIGDQYADL
FLAAKNLSDAILLSDILRVNTEITKAPLSASMIKRYDEHHQDLTLLKALV
RQQLPEKYKEIFFDQSKNGYAGYIDGGASQEEFYKFIKPILEKMDGTEEL
LVKLNREDLLRKQRTFDNGSIPHQIHLGELHAILRRQEDFYPFLKDNREK
IEKILTFRIPYYVGPLARGNSRFAWMTRKSEETITPWNFEEVVDKGASAQ
SFIERMTNFDKNLPNEKVLPKHSLLYEYFTVYNELTKVKYVTEGMRKPAF
LSGEQKKAIVDLLFKTNRKVTVKQLKEDYFKKIECFDSVEISGVEDRFNA
SLGTYHDLLKIIKDKDFLDNEENEDILEDIVLTLTLFEDREMIEERLKTY
AHLFDDKVMKQLKRRRYTGWGRLSRKLINGIRDKQSGKTILDFLKSDGFA
NRNFMQLIHDDSLTFKEDIQKAQVSGQGDSLHEHIANLAGSPAIKKGILQ
TVKVVDELVKVMGRHKPENIVIEMARENQTTQKGQKNSRERMKRIEEGIK
ELGSQILKEHPVENTQLQNEKLYLYYLQNGRDMYVDQELDINRLSDYDVD
HIVPQSFLKDDSIDNKVLTRSDKNRGKSDNVPSEEVVKKMKNYWRQLLNA
KLITQRKFDNLTKAERGGLSELDKAGFIKRQLVETRQITKHVAQILDSRM
NTKYDENDKLIREVKVITLKSKLVSDFRKDFQFYKVREINNYHHAHDAYL
NAVVGTALIKKYPKLESEFVYGDYKVYDVRKMIAKSEQEGADKRTADGSE
FESPKKKRKV*

[0328] In some embodiments, the nucleic acid programmable DNA binding protein (napDNAbp) is a single effector of a microbial CRISPR-Cas system. Single effectors of microbial CRISPR-Cas systems include, without limitation, Cas9, Cpf1, Cas12b/C2c1, and Cas12c/C2c3. Typically, microbial CRISPR-Cas systems are divided into Class 1 and Class 2 systems. Class 1 systems have multisubunit effector complexes, while Class 2 systems have a single protein effector. For example, Cas9 and Cpf1 are Class 2 effectors. In addition to Cas9 and Cpf1, three distinct Class 2 CRISPR-Cas systems (Cas12b/C2c1, and Cas12c/C2c3) have been described by Shmakov et al., “Discovery and Functional Characterization of Diverse Class 2 CRISPR Cas Systems”, Mol. Cell, 2015 Nov. 5; 60(3): 385-397, the entire contents of which is hereby incorporated by reference. Effectors of two of the systems, Cas12b/C2c1, and Cas12c/C2c3, contain RuvC-like endonuclease domains related to Cpf1. A third system contains an effector with two predicated HEPN RNase domains. Production of mature CRISPR RNA is tracrRNA-independent, unlike production of CRISPR RNA by Cas12b/C2c1. Cas12b/C2c1 depends on both CRISPR RNA and tracrRNA for DNA cleavage.

[0329] The crystal structure of Alicyclobaccillus acidoterrastris Cas12b/C2c1 (AacC2c1) has been reported in complex with a chimeric single-molecule guide RNA (sgRNA). See e.g., Liu et al., “C2c1-sgRNA Complex Structure Reveals RNA-Guided DNA Cleavage Mechanism”, Mol. Cell, 2017 Jan. 19; 65(2):310-322, the entire contents of which are hereby incorporated by reference. The crystal structure has also been reported in Alicyclobacillus acidoterrestris C2c1 bound to target DNAs as ternary complexes. See e.g., Yang et al., “PAM-dependent Target DNA Recognition and Cleavage by C2C1 CRISPR-Cas endonuclease”, Cell, 2016 Dec. 15; 167(7):1814-1828, the entire contents of which are hereby incorporated by reference. Catalytically competent conformations of AacC2c1, both with target and non-target DNA strands, have been captured independently positioned within a single RuvC catalytic pocket, with Cas12b/C2c1-mediated cleavage resulting in a staggered seven-nucleotide break of target DNA. Structural comparisons between Cas12b/C2c1 ternary complexes and previously identified Cas9 and Cpf1 counterparts demonstrate the diversity of mechanisms used by CRISPR-Cas9 systems.

[0330] In some embodiments, the nucleic acid programmable DNA binding protein (napDNAbp) of any of the fusion proteins provided herein may be a Cas12b/C2c1, or a Cas12c/C2c3 protein. In some embodiments, the napDNAbp is a Cas12b/C2c1 protein. In some embodiments, the napDNAbp is a Cas12c/C2c3 protein. In some embodiments, the napDNAbp comprises an amino acid sequence that is at least 85%, at least 90%, at least 91%, at least 92%, at least 93%, at least 94%, at least 95%, at least 96%, at least 97%, at least 98%, at least 99%, or at ease 99.5% identical to a naturally-occurring Cas12b/C2c1 or Cas12c/C2c3 protein. In some embodiments, the napDNAbp is a naturally-occurring Cas12b/C2c1 or Cas12c/C2c3 protein. In some embodiments, the napDNAbp comprises an amino acid sequence that is at least 85%, at least 90%, at least 91%, at least 92%, at least 93%, at least 94%, at least 95%, at least 96%, at least 97%, at least 98%, at least 99%, or at ease 99.5% identical to any one of the napDNAbp sequences provided herein. It should be appreciated that Cas12b/C2c1 or Cas12c/C2c3 from other bacterial species may also be used in accordance with the present disclosure.

[0331] A Cas12b/C2c1 ((uniprot.org/uniprot/T0D7A2#2) sp|T0D7A2|C2C1_ALIAG CRISPR-associated endonuclease C2c1 OS=Alicyclobacillus acido-terrestris (strain ATCC 49025/DSM 3922/CIP 106132/NCIMB 13137/GD3B) GN=c2c1 PE=1 SV=1) amino acid sequence is as follows:

(SEQ ID NO: 39)
MAVKSIKVKLRLDDMPEIRAGLWKLHKEVNAGVRYYTEWLSLLRQENLYR
RSPNGDGEQECDKTAEECKAELLERLRARQVENGHRGPAGSDDELLQLAR
QLYELLVPQAIGAKGDAQQIARKFLSPLADKDAVGGLGIAKAGNKPRWVR
MREAGEPGWEEEKEKAETRKSADRTADVLRALADFGLKPLMRVYTDSEMS
SVEWKPLRKGQAVRTWDRDMFQQAIERMMSWESWNQRVGQEYAKLVEQKN
RFEQKNFVGQEHLVHLVNQLQQDMKEASPGLESKEQTAHYVTGRALRGSD
KVFEKWGKLAPDAPFDLYDAEIKNVQRRNTRRFGSHDLFAKLAEPEYQAL
WREDASFLTRYAVYNSILRKLNHAKMFATFTLPDATAHPIWTRFDKLGGN
LHQYTFLFNEFGERRHAIRFHKLLKVENGVAREVDDVTVPISMSEQLDNL
LPRDPNEPIALYFRDYGAEQHFTGEFGGAKIQCRRDQLAHMHRRRGARDV
YLNVSVRVQSQSEARGERRPPYAAVFRLVGDNHRAFVHFDKLSDYLAEHP
DDGKLGSEGLLSGLRVMSVDLGLRTSASISVFRVARKDELKPNSKGRVPF
FFPIKGNDNLVAVHERSQLLKLPGETESKDLRAIREERQRTLRQLRTQLA
YLRLLVRCGSEDVGRRERSWAKLIEQPVDAANHMTPDWREAFENELQKLK
SLHGICSDKEWMDAVYESVRRVWRHMGKQVRDWRKDVRSGERPKIRGYAK
DVVGGNSIEQIEYLERQYKFLKSWSFFGKVSGQVIRAEKGSRFAITLREH
IDHAKEDRLKKLADRIIMEALGYVYALDERGKGKWVAKYPPCQLILLEEL
SEYQFNNDRPPSENNQLMQWSHRGVFQELINQAQVHDLLVGTMYAAFSSR
FDARTGAPGIRCRRVPARCTQEHNPEPFPWWLNKFVVEHTLDACPLRADD
LIPTGEGEIFVSPFSAEEGDFHQIHADLNAAQNLQQRLWSDFDISQIRLR
CDWGEVDGELVLIPRLTGKRTADSYSNKVFYTNTGVTYYERERGKKRRKV
FAQEKLSEEEAELLVEADEAREKSVVLMRDPSGIINRGNWTRQKEFWSMV
NQRIEGYLVKQIRSRVPLQDSACENTGDI

BhCas12b (Bacillus hisashii) NCBI Reference Sequence: WP_095142515

(SEQ ID NO: 91)
MAPKKKRKVGIHGVPAAATRSFILKIEPNEEVKKGLWKTHEVLNHGIAYY
MNILKLIRQEAIYEHHEQDPKNPKKVSKAEIQAELWDFVLKMQKCNSFTH
EVDKDEVFNILRELYEELVPSSVEKKGEANQLSNKFLYPLVDPNSQSGKG
TASSGRKPRWYNLKIAGDPSWEEEKKKWEEDKKKDPLAKILGKLAEYGLI
PLFIPYTDSNEPIVKEIKWMEKSRNQSVRRLDKDMFIQALERFLSWESWN
LKVKEEYEKVEKEYKTLEERIKEDIQALKALEQYEKERQEQLLRDTLNTN
EYRLSKRGLRGWREIIQKWLKMDENEPSEKYLEVFKDYQRKHPREAGDYS
VYEFLSKKENHFIWRNHPEYPYLYATFCEIDKKKKDAKQQATFTLADPIN
HPLWVRFEERSGSNLNKYRILTEQLHTEKLKKKLTVQLDRLIYPTESGGW
EEKGKVDIVLLPSRQFYNQIFLDIEEKGKHAFTYKDESIKFPLKGTLGGA
RVQFDRDHLRRYPHKVESGNVGRIYFNMTVNIEPTESPVSKSLKIHRDDF
PKVVNFKPKELTEWIKDSKGKKLKSGIESLEIGLRVMSIDLGQRQAAAAS
IFEVVDQKPDIEGKLFFPIKGTELYAVHRASFNIKLPGETLVKSREVLRK
AREDNLKLMNQKLNFLRNVLHFQQFEDITEREKRVTKWISRQENSDVPLV
YQDELIQIRELMYKPYKDWVAFLKQLHKRLEVEIGKEVKHWRKSLSDGRK
GLYGISLKNIDEIDRTRKFLLRWSLRPTEPGEVRRLEPGQRFAIDQLNHL
NALKEDRLKKMANTIIMHALGYCYDVRKKKWQAKNPACQIILFEDLSNYN
PYEERSRFENSKLMKWSRREIPRQVALQGEIYGLQVGEVGAQFSSRFHAK
TGSPGIRCSVVTKEKLQDNRFFKNLQREGRLTLDKIAVLKEGDLYPDKGG
EKFISLSKDRKCVTTHADINAAQNLQKRFWTRTHGFYKVYCKAYQVDGQT
VYIPESKDQKQKIIEEFGEGYFILKDGVYEWVNAGKLKIKKGSSKQSSSE
LVDSDILKDSFDLASELKGEKLMLYRDPSGNVFPSDKWMAAGVFFGKLER
ILISKLTNQYSISTIEDDSSKQSMKRPAATKKAGQAKKKK

[0332] In some embodiments, the Cas12b is BvCas12B. In some embodiments, the Cas12b comprises amino acid substitutions S893R, K846R, and E837G, as numbered in the exemplary BvCas12b amino acid sequence provided below.

BvCas12b (Bacillus sp. V3-13) NCBI Reference Sequence: WP_101661451.1:

(SEQ ID NO: 92)
MAIRSIKLKMKTNSGTDSIYLRKALWRTHQLINEGIAYYMNLLTLYRQEA
IGDKTKEAYQAELINIIRNQQRNNGSSEEHGSDQEILALLRQLYELIIPS
SIGESGDANQLGNKFLYPLVDPNSQSGKGTSNAGRKPRWKRLKEEGNPDW
ELEKKKDEERKAKDPTVKIFDNLNKYGLLPLFPLFTNIQKDIEWLPLGKR
QSVRKWDKDMFIQAIERLLSWESWNRRVADEYKQLKEKTESYYKEHLTGG
EEWIEKIRKFEKERNMELEKNAFAPNDGYFITSRQIRGWDRVYEKWSKLP
ESASPEELWKVVAEQQNKMSEGFGDPKVFSFLANRENRDIWRGHSERIYH
IAAYNGLQKKLSRTKEQATFTLPDAIEHPLWIRYESPGGTNLNLFKLEEK
QKKNYYVTLSKIIWPSEEKWIEKENIEIPLAPSIQFNRQIKLKQHVKGKQ
EISFSDYSSRISLDGVLGGSRIQFNRKYIKNHKELLGEGDIGPVFFNLVV
DVAPLQETRNGRLQSPIGKALKVISSDFSKVIDYKPKELMDWMNTGSASN
SFGVASLLEGMRVMSIDMGQRTSASVSIFEVVKELPKDQEQKLFYSINDT
ELFAIHKRSFLLNLPGEVVTKNNKQQRQERRKKRQFVRSQIRMLANVLRL
ETKKTPDERKKAIHKLMEIVQSYDSWTASQKEVWEKELNLLTNMAAFNDE
IWKESLVELHHRIEPYVGQIVSKWRKGLSEGRKNLAGISMWNIDELEDTR
RLLISWSKRSRTPGEANRIETDEPFGSSLLQHIQNVKDDRLKQMANLIIM
TALGFKYDKEEKDRYKRWKETYPACQIILFENLNRYLFNLDRSRRENSRL
MKWAHRSIPRTVSMQGEMFGLQVGDVRSEYSSRFHAKTGAPGIRCHALTE
EDLKAGSNTLKRLIEDGFINESELAYLKKGDIIPSQGGELFVTLSKRYKK
DSDNNELTVIHADINAAQNLQKRFWQQNSEVYRVPCQLARMGEDKLYIPK
SQTETIKKYFGKGSFVKNNTEQEVYKWEKSEKMKIKTDTTFDLQDLDGFE
DISKTIELAQEQQKKYLTMFRDPSGYFFNNETWRPQKEYWSIVNNIIKSC
LKKKILSNKVEL

### Guide Polynucleotides

[0333] In an embodiment, the guide polynucleotide is a guide RNA. An RNA/Cas complex can assist in “guiding” Cas protein to a target DNA. Cas9/crRNA/tracrRNA endonucleolytically cleaves linear or circular dsDNA target complementary to the spacer. The target strand not complementary to crRNA is first cut endonucleolytically, then trimmed 3′-5′ exonucleolytically. In nature, DNA-binding and cleavage typically requires protein and both RNAs. However, single guide RNAs (“sgRNA,” or simply “gNRA”) can be engineered so as to incorporate aspects of both the crRNA and tracrRNA into a single RNA species. See, e.g., Jinek M. et al., Science 337:816-821 (2012), the entire contents of which is hereby incorporated by reference. Cas9 recognizes a short motif in the CRISPR repeat sequences (the PAM or protospacer adjacent motif) to help distinguish self versus non-self. Cas9 nuclease sequences and structures are well known to those of skill in the art (see e.g., “Complete genome sequence of an M1 strain of Streptococcus pyogenes.” Ferretti, J. J. et al., Natl. Acad. Sci. U.S.A. 98:4658-4663 (2001); “CRISPR RNA maturation by trans-encoded small RNA and host factor RNase III.” Deltcheva E. et al., Nature 471:602-607 (2011); and “Programmable dual-RNA-guided DNA endonuclease in adaptive bacterial immunity.” Jinek M. et al, Science 337:816-821 (2012), the entire contents of each of which are incorporated herein by reference). Cas9 orthologs have been described in various species, including, but not limited to, S. pyogenes and S. thermophilus. Additional suitable Cas9 nucleases and sequences can be apparent to those of skill in the art based on this disclosure, and such Cas9 nucleases and sequences include Cas9 sequences from the organisms and loci disclosed in Chylinski, Rhun, and Charpentier, “The tracrRNA and Cas9 families of type II CRISPR-Cas immunity systems” (2013) RNA Biology 10:5, 726-737; the entire contents of which are incorporated herein by reference. In some embodiments, a Cas9 nuclease has an inactive (e.g., an inactivated) DNA cleavage domain, that is, the Cas9 is a nickase.

[0334] In some embodiments, the guide polynucleotide is at least one single guide RNA (“sgRNA” or “gNRA”). In some embodiments, the guide polynucleotide is at least one tracrRNA. In some embodiments, the guide polynucleotide does not require PAM sequence to guide the polynucleotide-programmable DNA-binding domain (e.g., Cas9 or Cpf1) to the target nucleotide sequence.

[0335] The polynucleotide programmable nucleotide binding domain (e.g., a CRISPR-derived domain) of the base editors disclosed herein can recognize a target polynucleotide sequence by associating with a guide polynucleotide. A guide polynucleotide (e.g., gRNA) is typically single-stranded and can be programmed to site-specifically bind (i.e., via complementary base pairing) to a target sequence of a polynucleotide, thereby directing a base editor that is in conjunction with the guide nucleic acid to the target sequence. A guide polynucleotide can be DNA. A guide polynucleotide can be RNA. In some embodiments, the guide polynucleotide comprises natural nucleotides (e.g., adenosine). In some embodiments, the guide polynucleotide comprises non-natural (or unnatural) nucleotides (e.g., peptide nucleic acid or nucleotide analogs). In some embodiments, the targeting region of a guide nucleic acid sequence can be at least 15, 16, 17, 18, 19, 20, 21, 22, 23, 24, 25, 26, 27, 28, 29, or 30 nucleotides in length. A targeting region of a guide nucleic acid can be between 10-30 nucleotides in length, or between 15-25 nucleotides in length, or between 15-20 nucleotides in length.

[0336] In some embodiments, a guide polynucleotide comprises two or more individual polynucleotides, which can interact with one another via for example complementary base pairing (e.g., a dual guide polynucleotide). For example, a guide polynucleotide can comprise a CRISPR RNA (crRNA) and a trans-activating CRISPR RNA (tracrRNA). For example, a guide polynucleotide can comprise one or more trans-activating CRISPR RNA (tracrRNA).

[0337] In type II CRISPR systems, targeting of a nucleic acid by a CRISPR protein (e.g., Cas9) typically requires complementary base pairing between a first RNA molecule (crRNA) comprising a sequence that recognizes the target sequence and a second RNA molecule (trRNA) comprising repeat sequences which forms a scaffold region that stabilizes the guide RNA-CRISPR protein complex. Such dual guide RNA systems can be employed as a guide polynucleotide to direct the base editors disclosed herein to a target polynucleotide sequence.

[0338] In some embodiments, the base editor provided herein utilizes a single guide polynucleotide (e.g., gRNA). In some embodiments, the base editor provided herein utilizes a dual guide polynucleotide (e.g., dual gRNAs). In some embodiments, the base editor provided herein utilizes one or more guide polynucleotide (e.g., multiple gRNA). In some embodiments, a single guide polynucleotide is utilized for different base editors described herein. For example, a single guide polynucleotide can be utilized for an adenosine base editor, or for an adenosine base editor and a cytidine base editor, e.g., as described in PCT/US19/44935.

[0339] In other embodiments, a guide polynucleotide can comprise both the polynucleotide targeting portion of the nucleic acid and the scaffold portion of the nucleic acid in a single molecule (i.e., a single-molecule guide nucleic acid). For example, a single-molecule guide polynucleotide can be a single guide RNA (sgRNA or gRNA). Herein the term guide polynucleotide sequence contemplates any single, dual or multi-molecule nucleic acid capable of interacting with and directing a base editor to a target polynucleotide sequence.

[0340] Typically, a guide polynucleotide (e.g., crRNA/trRNA complex or a gRNA) comprises a “polynucleotide-targeting segment” that includes a sequence capable of recognizing and binding to a target polynucleotide sequence, and a “protein-binding segment” that stabilizes the guide polynucleotide within a polynucleotide programmable nucleotide binding domain component of a base editor. In some embodiments, the polynucleotide targeting segment of the guide polynucleotide recognizes and binds to a DNA polynucleotide, thereby facilitating the editing of a base in DNA. In other cases, the polynucleotide targeting segment of the guide polynucleotide recognizes and binds to an RNA polynucleotide, thereby facilitating the editing of a base in RNA. Herein a “segment” refers to a section or region of a molecule, e.g., a contiguous stretch of nucleotides in the guide polynucleotide. A segment can also refer to a region/section of a complex such that a segment can comprise regions of more than one molecule. For example, where a guide polynucleotide comprises multiple nucleic acid molecules, the protein-binding segment of can include all or a portion of multiple separate molecules that are for instance hybridized along a region of complementarity. In some embodiments, a protein-binding segment of a DNA-targeting RNA that comprises two separate molecules can comprise (i) base pairs 40-75 of a first RNA molecule that is 100 base pairs in length; and (ii) base pairs 10-25 of a second RNA molecule that is 50 base pairs in length. The definition of “segment,” unless otherwise specifically defined in a particular context, is not limited to a specific number of total base pairs, is not limited to any particular number of base pairs from a given RNA molecule, is not limited to a particular number of separate molecules within a complex, and can include regions of RNA molecules that are of any total length and can include regions with complementarity to other molecules.

[0341] A guide RNA or a guide polynucleotide can comprise two or more RNAs, e.g., CRISPR RNA (crRNA) and transactivating crRNA (tracrRNA). A guide RNA or a guide polynucleotide can sometimes comprise a single-chain RNA, or single guide RNA (sgRNA) formed by fusion of a portion (e.g., a functional portion) of crRNA and tracrRNA. A guide RNA or a guide polynucleotide can also be a dual RNA comprising a crRNA and a tracrRNA. Furthermore, a crRNA can hybridize with a target DNA.

[0342] As discussed above, a guide RNA or a guide polynucleotide can be an expression product. For example, a DNA that encodes a guide RNA can be a vector comprising a sequence coding for the guide RNA. A guide RNA or a guide polynucleotide can be transferred into a cell by transfecting the cell with an isolated guide RNA or plasmid DNA comprising a sequence coding for the guide RNA and a promoter. A guide RNA or a guide polynucleotide can also be transferred into a cell in other way, such as using virus-mediated gene delivery.

[0343] A guide RNA or a guide polynucleotide can be isolated. For example, a guide RNA can be transfected in the form of an isolated RNA into a cell or organism. A guide RNA can be prepared by in vitro transcription using any in vitro transcription system known in the art. A guide RNA can be transferred to a cell in the form of isolated RNA rather than in the form of plasmid comprising encoding sequence for a guide RNA.

[0344] A guide RNA or a guide polynucleotide can comprise three regions: a first region at the 5′ end that can be complementary to a target site in a chromosomal sequence, a second internal region that can form a stem loop structure, and a third 3′ region that can be single-stranded. A first region of each guide RNA can also be different such that each guide RNA guides a fusion protein to a specific target site. Further, second and third regions of each guide RNA can be identical in all guide RNAs.

[0345] A first region of a guide RNA or a guide polynucleotide can be complementary to sequence at a target site in a chromosomal sequence such that the first region of the guide RNA can base pair with the target site. In some embodiments, a first region of a guide RNA can comprise from or from about 10 nucleotides to 25 nucleotides (i.e., from 10 nucleotides to nucleotides; or from about 10 nucleotides to about 25 nucleotides; or from 10 nucleotides to about 25 nucleotides; or from about 10 nucleotides to 25 nucleotides) or more. For example, a region of base pairing between a first region of a guide RNA and a target site in a chromosomal sequence can be or can be about 10, 11, 12, 13, 14, 15, 16, 17, 18, 19, 20, 22, 23, 24, 25, or more nucleotides in length. Sometimes, a first region of a guide RNA can be or can be about 19, 20, or 21 nucleotides in length.

[0346] A guide RNA or a guide polynucleotide can also comprise a second region that forms a secondary structure. For example, a secondary structure formed by a guide RNA can comprise a stem (or hairpin) and a loop. A length of a loop and a stem can vary. For example, a loop can range from or from about 3 to 10 nucleotides in length, and a stem can range from or from about 6 to 20 base pairs in length. A stem can comprise one or more bulges of 1 to 10 or about 10 nucleotides. The overall length of a second region can range from or from about 16 to 60 nucleotides in length. For example, a loop can be or can be about 4 nucleotides in length and a stem can be or can be about 12 base pairs.

[0347] A guide RNA or a guide polynucleotide can also comprise a third region at the 3′ end that can be essentially single-stranded. For example, a third region is sometimes not complementarity to any chromosomal sequence in a cell of interest and is sometimes not complementarity to the rest of a guide RNA. Further, the length of a third region can vary. A third region can be more than or more than about 4 nucleotides in length. For example, the length of a third region can range from or from about 5 to 60 nucleotides in length.

[0348] A guide RNA or a guide polynucleotide can target any exon or intron of a gene target. In some embodiments, a guide can target exon 1 or 2 of a gene, in other cases; a guide can target exon 3 or 4 of a gene. A composition can comprise multiple guide RNAs that all target the same exon or In some embodiments, multiple guide RNAs that can target different exons. An exon and an intron of a gene can be targeted.

[0349] A guide RNA or a guide polynucleotide can target a nucleic acid sequence of or of about 20 nucleotides. A target nucleic acid can be less than or less than about 20 nucleotides. A target nucleic acid can be at least or at least about 5, 10, 15, 16, 17, 18, 19, 20, 21, 22, 23, 24, 25, 30, or anywhere between 1-100 nucleotides in length. A target nucleic acid can be at most or at most about 5, 10, 15, 16, 17, 18, 19, 20, 21, 22, 23, 24, 25, 30, 40, 50, or anywhere between 1-100 nucleotides in length. A target nucleic acid sequence can be or can be about 20 bases immediately 5′ of the first nucleotide of the PAM. A guide RNA can target a nucleic acid sequence. A target nucleic acid can be at least or at least about 1-10, 1-20, 1-30, 1-40, 1-50, 1-60, 1-70, 1-80, 1-90, or 1-100 nucleotides.

[0350] A guide polynucleotide, for example, a guide RNA, can refer to a nucleic acid that can hybridize to another nucleic acid, for example, the target nucleic acid or protospacer in a genome of a cell. A guide polynucleotide can be RNA. A guide polynucleotide can be DNA.

[0351] The guide polynucleotide can be programmed or designed to bind to a sequence of nucleic acid site-specifically. A guide polynucleotide can comprise a polynucleotide chain and can be called a single guide polynucleotide. A guide polynucleotide can comprise two polynucleotide chains and can be called a double guide polynucleotide. A guide RNA can be introduced into a cell or embryo as an RNA molecule. For example, a RNA molecule can be transcribed in vitro and/or can be chemically synthesized. An RNA can be transcribed from a synthetic DNA molecule, e.g., a gBlocks® gene fragment. A guide RNA can then be introduced into a cell or embryo as an RNA molecule. A guide RNA can also be introduced into a cell or embryo in the form of a non-RNA nucleic acid molecule, e.g., DNA molecule. For example, a DNA encoding a guide RNA can be operably linked to promoter control sequence for expression of the guide RNA in a cell or embryo of interest. An RNA coding sequence can be operably linked to a promoter sequence that is recognized by RNA polymerase III (Pol III). Plasmid vectors that can be used to express guide RNA include, but are not limited to, px330 vectors and px333 vectors. In some embodiments, a plasmid vector (e.g., px333 vector) can comprise at least two guide RNA-encoding DNA sequences.

[0352] Methods for selecting, designing, and validating guide polynucleotides, e.g., guide RNAs and targeting sequences are described herein and known to those skilled in the art. For example, to minimize the impact of potential substrate promiscuity of a deaminase domain in the nucleobase editor system (e.g., an AID domain), the number of residues that could unintentionally be targeted for deamination (e.g., off-target C residues that could potentially reside on ssDNA within the target nucleic acid locus) may be minimized. In addition, software tools can be used to optimize the gRNAs corresponding to a target nucleic acid sequence, e.g., to minimize total off-target activity across the genome. For example, for each possible targeting domain choice using S. pyogenes Cas9, all off-target sequences (preceding selected PAMs, e.g., NAG or NGG) may be identified across the genome that contain up to certain number (e.g., 1, 2, 3, 4, 5, 6, 7, 8, 9, or 10) of mismatched base-pairs. First regions of gRNAs complementary to a target site can be identified, and all first regions (e.g., crRNAs) can be ranked according to its total predicted off-target score; the top-ranked targeting domains represent those that are likely to have the greatest on-target and the least off-target activity. Candidate targeting gRNAs can be functionally evaluated by using methods known in the art and/or as set forth herein.

[0353] As a non-limiting example, target DNA hybridizing sequences in crRNAs of a guide RNA for use with Cas9s may be identified using a DNA sequence searching algorithm. gRNA design may be carried out using custom gRNA design software based on the public tool cas-offinder as described in Bae S., Park J., & Kim J.-S. Cas-OFFinder: A fast and versatile algorithm that searches for potential off-target sites of Cas9 RNA-guided endonucleases. Bioinformatics 30, 1473-1475 (2014). This software scores guides after calculating their genome-wide off-target propensity. Typically matches ranging from perfect matches to 7 mismatches are considered for guides ranging in length from 17 to 24. Once the off-target sites are computationally-determined, an aggregate score is calculated for each guide and summarized in a tabular output using a web-interface. In addition to identifying potential target sites adjacent to PAM sequences, the software also identifies all PAM adjacent sequences that differ by 1, 2, 3 or more than 3 nucleotides from the selected target sites. Genomic DNA sequences for a target nucleic acid sequence, e.g., a target gene may be obtained and repeat elements may be screened using publicly available tools, for example, the RepeatMasker program. RepeatMasker searches input DNA sequences for repeated elements and regions of low complexity. The output is a detailed annotation of the repeats present in a given query sequence.

[0354] Following identification, first regions of guide RNAs, e.g., crRNAs, may be ranked into tiers based on their distance to the target site, their orthogonality and presence of 5′ nucleotides for close matches with relevant PAM sequences (for example, a 5′ G based on identification of close matches in the human genome containing a relevant PAM e.g., NGG PAM for S. pyogenes, NNGRRT or NNGRRV PAM for S. aureus). As used herein, orthogonality refers to the number of sequences in the human genome that contain a minimum number of mismatches to the target sequence. A “high level of orthogonality” or “good orthogonality” may, for example, refer to 20-mer targeting domains that have no identical sequences in the human genome besides the intended target, nor any sequences that contain one or two mismatches in the target sequence. Targeting domains with good orthogonality may be selected to minimize off-target DNA cleavage.

[0355] In some embodiments, a reporter system may be used for detecting base-editing activity and testing candidate guide polynucleotides. In some embodiments, a reporter system may comprise a reporter gene-based assay where base editing activity leads to expression of the reporter gene. For example, a reporter system may include a reporter gene comprising a deactivated start codon, e.g., a mutation on the template strand from 3′-TAC-5′ to 3′-CAC-5′. Upon successful deamination of the target C, the corresponding mRNA will be transcribed as 5′-AUG-3′ instead of 5′-GUG-3′, enabling the translation of the reporter gene. Suitable reporter genes will be apparent to those of skill in the art. Non-limiting examples of reporter genes include gene encoding green fluorescence protein (GFP), red fluorescence protein (RFP), luciferase, secreted alkaline phosphatase (SEAP), or any other gene whose expression are detectable and apparent to those skilled in the art. The reporter system can be used to test many different gRNAs, e.g., in order to determine which residue(s) with respect to the target DNA sequence the respective deaminase will target. sgRNAs that target non-template strand can also be tested in order to assess off-target effects of a specific base editing protein, e.g., a Cas9 deaminase fusion protein. In some embodiments, such gRNAs can be designed such that the mutated start codon will not be base-paired with the gRNA. The guide polynucleotides can comprise standard ribonucleotides, modified ribonucleotides (e.g., pseudouridine), ribonucleotide isomers, and/or ribonucleotide analogs. In some embodiments, the guide polynucleotide can comprise at least one detectable label. The detectable label can be a fluorophore (e.g., FAM, TMR, Cy3, Cy5, Texas Red, Oregon Green, Alexa Fluors, Halo tags, or suitable fluorescent dye), a detection tag (e.g., biotin, digoxigenin, and the like), quantum dots, or gold particles.

[0356] The guide polynucleotides can be synthesized chemically, synthesized enzymatically, or a combination thereof. For example, the guide RNA can be synthesized using standard phosphoramidite-based solid-phase synthesis methods. Alternatively, the guide RNA can be synthesized in vitro by operably linking DNA encoding the guide RNA to a promoter control sequence that is recognized by a phage RNA polymerase. Examples of suitable phage promoter sequences include T7, T3, SP6 promoter sequences, or variations thereof. In embodiments in which the guide RNA comprises two separate molecules (e.g., crRNA and tracrRNA), the crRNA can be chemically synthesized and the tracrRNA can be enzymatically synthesized.

[0357] In some embodiments, a base editor system may comprise multiple guide polynucleotides, e.g., gRNAs. For example, the gRNAs may target to one or more target loci (e.g., at least 1 gRNA, at least 2 gRNA, at least 5 gRNA, at least 10 gRNA, at least 20 gRNA, at least 30 g RNA, at least 50 gRNA) comprised in a base editor system. The multiple gRNA sequences can be tandemly arranged and are preferably separated by a direct repeat.

[0358] A DNA sequence encoding a guide RNA or a guide polynucleotide can also be part of a vector. Further, a vector can comprise additional expression control sequences (e.g., enhancer sequences, Kozak sequences, polyadenylation sequences, transcriptional termination sequences, etc.), selectable marker sequences (e.g., GFP or antibiotic resistance genes such as puromycin), origins of replication, and the like. A DNA molecule encoding a guide RNA can also be linear. A DNA molecule encoding a guide RNA or a guide polynucleotide can also be circular.

[0359] In some embodiments, one or more components of a base editor system may be encoded by DNA sequences. Such DNA sequences may be introduced into an expression system, e.g., a cell, together or separately. For example, DNA sequences encoding a polynucleotide programmable nucleotide binding domain and a guide RNA may be introduced into a cell, each DNA sequence can be part of a separate molecule (e.g., one vector containing the polynucleotide programmable nucleotide binding domain coding sequence and a second vector containing the guide RNA coding sequence) or both can be part of a same molecule (e.g., one vector containing coding (and regulatory) sequence for both the polynucleotide programmable nucleotide binding domain and the guide RNA).

[0360] A guide polynucleotide can comprise one or more modifications to provide a nucleic acid with a new or enhanced feature. A guide polynucleotide can comprise a nucleic acid affinity tag. A guide polynucleotide can comprise synthetic nucleotide, synthetic nucleotide analog, nucleotide derivatives, and/or modified nucleotides.

[0361] In some embodiments, a gRNA or a guide polynucleotide can comprise modifications. A modification can be made at any location of a gRNA or a guide polynucleotide. More than one modification can be made to a single gRNA or a guide polynucleotide. A gRNA or a guide polynucleotide can undergo quality control after a modification. In some embodiments, quality control can include PAGE, HPLC, MS, or any combination thereof.

[0362] A modification of a gRNA or a guide polynucleotide can be a substitution, insertion, deletion, chemical modification, physical modification, stabilization, purification, or any combination thereof.

[0363] A gRNA or a guide polynucleotide can also be modified by 5′ adenylate, 5′ guanosine-triphosphate cap, 5′N7-Methylguanosine-triphosphate cap, 5′ triphosphate cap, 3′ phosphate, 3′ thiophosphate, 5′ phosphate, 5′ thiophosphate, Cis-Syn thymidine dimer, trimers, C12 spacer, C3 spacer, C6 spacer, dSpacer, PC spacer, rSpacer, Spacer 18, Spacer 9,3′-3′ modifications, 5′-5′ modifications, abasic, acridine, azobenzene, biotin, biotin BB, biotin TEG, cholesteryl TEG, desthiobiotin TEG, DNP TEG, DNP-X, DOTA, dT-Biotin, dual biotin, PC biotin, psoralen C2, psoralen C6, TINA, 3′DABCYL, black hole quencher 1, black hole quencher 2, DABCYL SE, dT-DABCYL, IRDye QC-1, QSY-21, QSY-35, QSY-7, QSY-9, carboxyl linker, thiol linkers, 2′-deoxyribonucleoside analog purine, 2′-deoxyribonucleoside analog pyrimidine, ribonucleoside analog, 2′-O-methyl ribonucleoside analog, sugar modified analogs, wobble/universal bases, fluorescent dye label, 2′-fluoro RNA, 2′-O-methyl RNA, methylphosphonate, phosphodiester DNA, phosphodiester RNA, phosphothioate DNA, phosphorothioate RNA, UNA, pseudouridine-5′-triphosphate, 5′-methylcytidine-5′-triphosphate, or any combination thereof.

[0364] In some embodiments, a modification is permanent. In other cases, a modification is transient. In some embodiments, multiple modifications are made to a gRNA or a guide polynucleotide. A gRNA or a guide polynucleotide modification can alter physiochemical properties of a nucleotide, such as their conformation, polarity, hydrophobicity, chemical reactivity, base-pairing interactions, or any combination thereof.

[0365] The PAM sequence can be any PAM sequence known in the art. Suitable PAM sequences include, but are not limited to, NGG, NGA, NGC, NGN, NGT, NGCG, NGAG, NGAN, NGNG, NGCN, NGCG, NGTN, NNGRRT, NNNRRT, NNGRR(N), TTTV, TYCV, TYCV, TATV, NNNNGATT, NNAGAAW, or NAAAAC. Y is a pyrimidine; N is any nucleotide base; W is A or T.

[0366] A modification can also be a phosphorothioate substitute. In some embodiments, a natural phosphodiester bond can be susceptible to rapid degradation by cellular nucleases and; a modification of internucleotide linkage using phosphorothioate (PS) bond substitutes can be more stable towards hydrolysis by cellular degradation. A modification can increase stability in a gRNA or a guide polynucleotide. A modification can also enhance biological activity. In some embodiments, a phosphorothioate enhanced RNA gRNA can inhibit RNase A, RNase T1, calf serum nucleases, or any combinations thereof. These properties can allow the use of PS-RNA gRNAs to be used in applications where exposure to nucleases is of high probability in vivo or in vitro. For example, phosphorothioate (PS) bonds can be introduced between the last 3-5 nucleotides at the 5′- or “-end of a gRNA which can inhibit exonuclease degradation. In some embodiments, phosphorothioate bonds can be added throughout an entire gRNA to reduce attack by endonucleases.

### Protospacer Adjacent Motif

[0367] The term “protospacer adjacent motif (PAM)” or PAM-like motif refers to a 2-6 base pair DNA sequence immediately following the DNA sequence targeted by the Cas9 nuclease in the CRISPR bacterial adaptive immune system. In some embodiments, the PAM can be a 5′ PAM (i.e., located upstream of the 5′ end of the protospacer). In other embodiments, the PAM can be a 3′ PAM (i.e., located downstream of the 5′ end of the protospacer).

[0368] The PAM sequence is essential for target binding, but the exact sequence depends on a type of Cas protein.

[0369] A base editor provided herein can comprise a CRISPR protein-derived domain that is capable of binding a nucleotide sequence that contains a canonical or non-canonical protospacer adjacent motif (PAM) sequence. A PAM site is a nucleotide sequence in proximity to a target polynucleotide sequence. Some aspects of the disclosure provide for base editors comprising all or a portion of CRISPR proteins that have different PAM specificities. For example, typically Cas9 proteins, such as Cas9 from S. pyogenes (spCas9), require a canonical NGG PAM sequence to bind a particular nucleic acid region, where the “N” in “NGG” is adenine (A), thymine (T), guanine (G), or cytosine (C), and the G is guanine. A PAM can be CRISPR protein-specific and can be different between different base editors comprising different CRISPR protein-derived domains. A PAM can be 5′ or 3′ of a target sequence. A PAM can be upstream or downstream of a target sequence. A PAM can be 1, 2, 3, 4, 5, 6, 7, 8, 9, 10 or more nucleotides in length. Often, a PAM is between 2-6 nucleotides in length. Several PAM variants are described in Table 1 below.

TABLE 1
Cas9 proteins and corresponding PAM sequences

| Variant | PAM |
|---|---|
| spCas9 | NGG |
| spCas9-VRQR | NGA |
| spCas9-VRER | NGCG |
| xCas9 (sp) | NGN |
| saCas9 | NNGRRT |
| saCas9-KKH | NNNRRT |
| spCas9-MQKSER | NGCG |
| spCas9-MQKSER | NGCN |
| spCas9-LRKIQK | NGTN |
| spCas9-LRVSQK | NGTN |
| spCas9-LRVSQL | NGTN |
| spCas9-MQKFRAER | NGC |
| Cpf1 | 5′ (TTTV) |
| SpyMac | 5′-NAA-3′ |

[0370] In some embodiments, the PAM is NGC. In some embodiments, the NGC PAM is recognized by a Cas9 variant. In some embodiments, the NGC PAM variant includes one or more amino acid substitutions selected from D1135M, S1136Q, G1218K, E1219F, A1322R, D1332A, R1335E, and T1337R (collectively termed “MQKFRAER”).

[0371] In some embodiments, the PAM is NGT. In some embodiments, the NGT PAM is recognized by a Cas9 variant. In some embodiments, the NGT PAM variant is generated through targeted mutations at one or more residues 1335, 1337, 1135, 1136, 1218, and/or 1219. In some embodiments, the NGT PAM variant is created through targeted mutations at one or more residues 1219, 1335, 1337, 1218. In some embodiments, the NGT PAM variant is created through targeted mutations at one or more residues 1135, 1136, 1218, 1219, and 1335. In some embodiments, the NGT PAM variant is selected from the set of targeted mutations provided in Table 2 and Table 3 below.

TABLE 2
NGT PAM Variant Mutations at residues 1219, 1335, 1337, 1218

| Variant | E1219V | R1335Q | T1337 | G1218 |
|---|---|---|---|---|
| 1 | F | V | T | |
| 2 | F | V | R | |
| 3 | F | V | Q | |
| 4 | F | V | L | |
| 5 | F | V | T | R |
| 6 | F | V | R | R |
| 7 | F | V | Q | R |
| 8 | F | V | L | R |
| 9 | L | L | T | |
| 10 | L | L | R | |
| 11 | L | L | Q | |
| 12 | L | L | L | |
| 13 | F | I | T | |
| 14 | F | I | R | |
| 15 | F | I | Q | |
| 16 | F | I | L | |
| 17 | F | G | C | |
| 18 | H | L | N | |
| 19 | F | G | C | A |
| 20 | H | L | N | V |
| 21 | L | A | W | |
| 22 | L | A | F | |
| 23 | L | A | Y | |
| 24 | I | A | W | |
| 25 | I | A | F | |
| 26 | I | A | Y | |

TABLE 3
NGT PAM Variant Mutations at residues
1135, 1136, 1218, 1219, and 1335

| Variant | D1135L | S1136R | G1218S | E1219V | R1335Q |
|---|---|---|---|---|---|
| 27 | G | | | | |
| 28 | V | | | | |
| 29 | I | | | | |
| 30 | | A | | | |
| 31 | | W | | | |
| 32 | | H | | | |
| 33 | | K | | | |
| 34 | | | K | | |
| 35 | | | R | | |
| 36 | | | Q | | |
| 37 | | | T | | |
| 38 | | | N | | |
| 39 | | | | I | |
| 40 | | | | A | |
| 41 | | | | N | |
| 42 | | | | Q | |
| 43 | | | | G | |
| 44 | | | | L | |
| 45 | | | | S | |
| 46 | | | | T | |
| 47 | | | | | L |
| 48 | | | | | I |
| 49 | | | | | V |
| 50 | | | | | N |
| 51 | | | | | S |
| 52 | | | | | T |
| 53 | | | | | F |
| 54 | | | | | Y |
| 55 | N1286Q | I1331F | | | |

[0372] In some embodiments, the NGT PAM variant is selected from variant 5, 7, 28, 31, or 36 in Tables 2 and 3. In some embodiments, the variants have improved NGT PAM recognition.

[0373] In some embodiments, the NGT PAM variants have mutations at residues 1219, 1335, 1337, and/or 1218. In some embodiments, the NGT PAM variant is selected with mutations for improved recognition from the variants provided in Table 4 below.

TABLE 4
NGT PAM Variant Mutations at residues
1219, 1335, 1337, and 1218

| Variant | E1219V | R1335Q | T1337 | G1218 |
|---|---|---|---|---|
| 1 | F | V | T | |
| 2 | F | V | R | |
| 3 | F | V | Q | |
| 4 | F | V | L | |
| 5 | F | V | T | R |
| 6 | F | V | R | R |
| 7 | F | V | Q | R |
| 8 | F | V | L | R |

[0374] In some embodiments, base editors with specificity for NGT PAM may be generated as provided in Table SA below.

TABLE 5A
NGT PAM variants

| | NGTN variant | D1135 | S1136 | G1218 | E1219 | A1322R | R1335 | T1337 |
|---|---|---|---|---|---|---|---|---|
| Variant 1 | LRKIQK | L | R | K | I | — | Q | K |
| Variant 2 | LRSVQK | L | R | S | V | — | Q | K |
| Variant 3 | LRSVQL | L | R | S | V | — | Q | L |
| Variant 4 | LRKIRQK | L | R | K | I | R | Q | K |
| Variant 5 | LRSVRQK | L | R | S | V | R | Q | K |
| Variant 6 | LRSVRQL | L | R | S | V | R | Q | L |

[0375] In some embodiments the NGTN variant is variant 1. In some embodiments, the NGTN variant is variant 2. In some embodiments, the NGTN variant is variant 3. In some embodiments, the NGTN variant is variant 4. In some embodiments, the NGTN variant is variant 5. In some embodiments, the NGTN variant is variant 6.

[0376] In some embodiments, the Cas9 domain is a Cas9 domain from Streptococcus pyogenes (SpCas9). In some embodiments, the SpCas9 domain is a nuclease active SpCas9, a nuclease inactive SpCas9 (SpCas9d), or a SpCas9 nickase (SpCas9n). In some embodiments, the SpCas9 comprises a D10X mutation, or a corresponding mutation in any of the amino acid sequences provided herein, wherein X is any amino acid except for D. In some embodiments, the SpCas9 comprises a D10A mutation, or a corresponding mutation in any of the amino acid sequences provided herein. In some embodiments, the SpCas9 domain, the SpCas9d domain, or the SpCas9n domain can bind to a nucleic acid sequence having a non-canonical PAM. In some embodiments, the SpCas9 domain, the SpCas9d domain, or the SpCas9n domain can bind to a nucleic acid sequence having an NGG, a NGA, or a NGCG PAM sequence.

[0377] In some embodiments, the Cas9 domain is a Cas9 domain from Streptococcus pyogenes (SpCas9). In some embodiments, the SpCas9 domain is a nuclease active SpCas9, a nuclease inactive SpCas9 (SpCas9d), or a SpCas9 nickase (SpCas9n). In some embodiments, the SpCas9 comprises a D9X mutation, or a corresponding mutation in any of the amino acid sequences provided herein, wherein X is any amino acid except for D. In some embodiments, the SpCas9 comprises a D9A mutation, or a corresponding mutation in any of the amino acid sequences provided herein. In some embodiments, the SpCas9 domain, the SpCas9d domain, or the SpCas9n domain can bind to a nucleic acid sequence having a non-canonical PAM. In some embodiments, the SpCas9 domain, the SpCas9d domain, or the SpCas9n domain can bind to a nucleic acid sequence having an NGG, a NGA, or a NGCG PAM sequence. In some embodiments, the SpCas9 domain comprises one or more of a D1135X, a R1335X, and a T1337X mutation, or a corresponding mutation in any of the amino acid sequences provided herein, wherein X is any amino acid. In some embodiments, the SpCas9 domain comprises one or more of a D1135E, R1335Q, and T1337R mutation, or a corresponding mutation in any of the amino acid sequences provided herein. In some embodiments, the SpCas9 domain comprises a D1135E, a R1335Q, and a T1337R mutation, or corresponding mutations in any of the amino acid sequences provided herein. In some embodiments, the SpCas9 domain comprises one or more of a D1135X, a R1335X, and a T1337X mutation, or a corresponding mutation in any of the amino acid sequences provided herein, wherein X is any amino acid. In some embodiments, the SpCas9 domain comprises one or more of a D1135V, a R1335Q, and a T1337R mutation, or a corresponding mutation in any of the amino acid sequences provided herein. In some embodiments, the SpCas9 domain comprises a D1135V, a R1335Q, and a T1337R mutation, or corresponding mutations in any of the amino acid sequences provided herein. In some embodiments, the SpCas9 domain comprises one or more of a D1135X, a G1218X, a R1335X, and a T1337X mutation, or a corresponding mutation in any of the amino acid sequences provided herein, wherein X is any amino acid. In some embodiments, the SpCas9 domain comprises one or more of a D1135V, a G1218R, a R1335Q, and a T1337R mutation, or a corresponding mutation in any of the amino acid sequences provided herein. In some embodiments, the SpCas9 domain comprises a D1135V, a G1218R, a R1335Q, and a T1337R mutation, or corresponding mutations in any of the amino acid sequences provided herein. In some embodiments, the Cas9 is a Cas9 variant having specificity for an altered PAM sequence. In some embodiments, the Additional Cas9 variants and PAM sequences are described in Miller et al., Continuous evolution of SpCas9 variants compatible with non-G PAMs. Nat Biotechnol (2020). https://doi.org/10.1038/s41587-020-4112-8, the entirety of which is incorporated herein by reference. in some embodiments, a Cas9 variate have no specific PAM requirements. In some embodiments, a Cas9 variant, e.g. a SpCas9 variant has specificity for a NRNH PAM, wherein R is A or G and H is A, C, or T. In some embodiments, the SpCas9 variant has specificity for a PAM sequence AAA, TAA, CAA, GAA, TAT, GAT, or CAC. In some embodiments, the SpCas9 variant comprises an amino acid substitution at position 1114, 1134, 1135, 1137, 1139, 1151, 1180, 1188, 1211, 1218, 1219, 1221, 1249, 1256, 1264, 1290, 1318, 1317, 1320, 1321, 1323, 1332, 1333, 1335, 1337, or 1339 as numbered in SEQ ID NO: 1 or a corresponding position thereof. In some embodiments, the SpCas9 variant comprises an amino acid substitution at position 1114, 1135, 1218, 1219, 1221, 1249, 1320, 1321, 1323, 1332, 1333, 1335, or 1337 as numbered in SEQ ID NO: 1 or a corresponding position thereof. In some embodiments, the SpCas9 variant comprises an amino acid substitution at position 1114, 1134, 1135, 1137, 1139, 1151, 1180, 1188, 1211, 1219, 1221, 1256, 1264, 1290, 1318, 1317, 1320, 1323, 1333 as numbered in SEQ ID NO: 1 or a corresponding position thereof. In some embodiments, the SpCas9 variant comprises an amino acid substitution at position 1114, 1131, 1135, 1150, 1156, 1180, 1191, 1218, 1219, 1221, 1227, 1249, 1253, 1286, 1293, 1320, 1321, 1332, 1335, 1339 as numbered in SEQ ID NO: 1 or a corresponding position thereof. In some embodiments, the SpCas9 variant comprises an amino acid substitution at position 1114, 1127, 1135, 1180, 1207, 1219, 1234, 1286, 1301, 1332, 1335, 1337, 1338, 1349 as numbered in SEQ ID NO: 1 or a corresponding position thereof. Exemplary amino acid substitutions and PAM specificity of SpCas9 variants are shown in Tables 5B, 5C, 5D, and 5E below.

TABLE 5B

| | SpCas9 amino acid position | | | | | | | | | | | | |
|---|---|---|---|---|---|---|---|---|---|---|---|---|---|
| SpCas9/ | 1114 | 1135 | 1218 | 1219 | 1221 | 1249 | 1320 | 1321 | 1323 | 1332 | 1333 | 1335 | 1337 |
| PAM | R | D | G | E | Q | P | A | P | A | D | R | R | T |
| AAA | | N | | V | H | | | | | | G | | |
| AAA | | N | | V | H | | | | | | G | | |
| AAA | | | | V | | | | | | | G | | |
| TAA | G | N | | V | | | | | | | I | | |
| TAA | | N | | V | | | | | | | I | | A |
| TAA | G | N | | V | | | | | | | I | | A |
| CAA | | | | V | | | | | | | K | | |
| CAA | | N | | V | | | | | | | K | | |
| CAA | | N | | V | | | | | | | K | | |
| GAA | | | | V | H | | V | | | | K | | |
| GAA | | N | | V | | | V | | | | K | | |
| GAA | | | | V | H | | V | | | | K | | |
| TAT | | | S | V | H | S | | S | | | | L | |
| TAT | | | S | V | H | S | | S | | | | L | |
| TAT | | | S | V | H | S | | S | | | | L | |
| GAT | | | | V | | | | | | | I | | |
| GAT | | | | V | | | | | D | | | Q | |
| GAT | | | | V | | | | | D | | | Q | |
| CAC | | | | V | | | | | | N | | Q | N |
| CAC | | N | | V | | | | | | | | Q | N |
| CAC | | | | V | | | | | | N | | Q | N |

TABLE 5C

| | SpCas9 amino acid position | | | | | | | | | | | | | | | | | | |
|---|---|---|---|---|---|---|---|---|---|---|---|---|---|---|---|---|---|---|---|
| SpCas9/ | 1114 | 1134 | 1135 | 1137 | 1139 | 1151 | 1180 | 1188 | 1211 | 1219 | 1221 | 1256 | 1264 | 1290 | 1318 | 1317 | 1320 | 1323 | 1333 |
| PAM | R | F | D | P | V | K | D | K | K | E | Q | Q | H | V | L | N | A | A | R |
| GAA | | | | | | | | | | V | H | | | | | | V | | K |
| GAA | | | N | S | | | | | | V | | | | | | | V | D | K |
| GAA | | | N | | | | | | | V | H | | Y | | | | V | | K |
| CAA | | | N | | | | | | | V | H | | Y | | | | V | | K |
| CAA | G | | N | S | | | | | | V | H | | Y | | | | V | | K |
| CAA | | | N | | | | | R | | V | H | | | | | | V | | K |
| CAA | | | N | | | | G | | R | V | H | | Y | | | | V | | K |
| CAA | | | N | | | | | | | V | H | | Y | | | | V | | K |
| AAA | | | N | | | | G | | | V | H | R | Y | | | | V | D | K |
| CAA | G | | N | | | | G | | | V | H | | Y | | | | V | D | K |
| CAA | | L | N | | | | G | | | V | H | | Y | | | T | V | D | K |
| TAA | G | | N | | | | G | | | V | H | | Y | G | S | | V | D | K |
| TAA | G | | N | | | E | G | | | V | H | | Y | | S | | V | | K |
| TAA | G | | N | | | | G | | | V | H | | Y | | S | | V | D | K |
| TAA | G | | N | | | | G | | R | V | H | | | | | | V | | K |
| TAA | | | N | | | | G | | R | V | H | | Y | | | | V | | K |
| TAA | G | | N | | A | | G | | | V | H | | | | | | V | | K |
| TAA | G | | N | | | | | | | V | H | | | | | | V | | K |

TABLE 5D

| | SpCas9 amino acid position | | | | | | | | | |
|---|---|---|---|---|---|---|---|---|---|---|
| SpCas9/ | 1114 | 1131 | 1135 | 1150 | 1156 | 1180 | 1191 | 1218 | 1219 | 1221 |
| PAM | R | Y | D | E | K | D | K | G | E | Q |
| SacB.TAT | | | N | | | | N | | V | H |
| SacB.TAT | | | N | | | | | S | V | H |
| AAT | | | N | | | | | S | V | H |
| TAT | G | | N | | | G | | S | V | H |
| TAT | G | | N | | | G | | S | V | H |
| TAT | G | C | N | | | G | | S | V | H |
| TAT | G | C | N | | | G | | S | V | H |
| TAT | G | C | N | | | G | | S | V | H |
| TAT | G | C | N | | E | G | | S | V | H |
| TAT | G | C | N | V | | G | | S | V | H |
| TAT | | C | N | | | G | | S | V | H |
| TAT | G | C | N | | | G | | S | V | H |

| | SpCas9 amino acid position | | | | | | | | | |
|---|---|---|---|---|---|---|---|---|---|---|
| SpCas9/ | 1227 | 1249 | 1253 | 1286 | 1293 | 1320 | 1321 | 1332 | 1335 | 1339 |
| PAM | A | P | E | N | A | A | P | D | R | T |
| SacB.TAT | | | | | | V | S | | L | |
| SacB.TAT | | S | | | | | S | G | L | |
| AAT | V | S | | K | T | | S | G | L | I |
| TAT | | S | K | | | | S | G | L | |
| TAT | | S | | | | | S | G | L | |
| TAT | | S | | | | | S | G | L | |
| TAT | | S | | | | | S | G | L | |
| TAT | | S | | | | | S | G | L | |
| TAT | | S | | | | | S | G | L | |
| TAT | | S | | | | | S | G | L | |
| TAT | | S | | | | | S | G | L | |
| TAT | | S | | | | | S | G | L | |

TABLE 5E

| | SpCas9 amino acid position | | | | | | | | | | | | | |
|---|---|---|---|---|---|---|---|---|---|---|---|---|---|---|
| SpCas9/ | 1114 | 1127 | 1135 | 1180 | 1207 | 1219 | 1234 | 1286 | 1301 | 1332 | 1335 | 1337 | 1338 | 1349 |
| PAM | R | D | D | D | E | E | N | N | P | D | R | T | S | H |

| | | | | | | | | | | | | | |
|---|---|---|---|---|---|---|---|---|---|---|---|---|---|
| SacB.CAC | | | N | | | V | | | N | Q | N | | |
| AAC | G | | N | | | V | | | N | Q | N | | |
| AAC | G | | N | | | V | | | N | Q | N | | |
| TAC | G | | N | | | V | | | N | Q | N | | |
| TAC | G | | N | | | V | | H | N | Q | N | | |
| TAC | G | | N | | G | V | D | H | N | Q | N | | |
| TAC | G | | N | | | V | | | N | Q | N | | |
| TAC | G | G | N | E | | V | | H | N | Q | N | | |
| TAC | G | | N | | | V | | H | N | Q | N | | |
| TAC | G | | N | | | V | | | N | Q | N | T | R |

[0378] In some embodiments, the Cas9 domains of any of the fusion proteins provided herein comprises an amino acid sequence that is at least 60%, at least 65%, at least 70%, at least 75%, at least 80%, at least 85%, at least 90%, at least 95%, at least 96%, at least 97%, at least 98%, at least 99%, or at least 99.5% identical to a Cas9 polypeptide described herein. In some embodiments, the Cas9 domains of any of the fusion proteins provided herein comprises the amino acid sequence of any Cas9 polypeptide described herein. In some embodiments, the Cas9 domains of any of the fusion proteins provided herein consists of the amino acid sequence of any Cas9 polypeptide described herein.

[0379] In some examples, a PAM recognized by a CRISPR protein-derived domain of a base editor disclosed herein can be provided to a cell on a separate oligonucleotide to an insert (e.g., an AAV insert) encoding the base editor. In such embodiments, providing PAM on a separate oligonucleotide can allow cleavage of a target sequence that otherwise would not be able to be cleaved, because no adjacent PAM is present on the same polynucleotide as the target sequence.

[0380] In an embodiment, S. pyogenes Cas9 (SpCas9) can be used as a CRISPR endonuclease for genome engineering. However, others can be used. In some embodiments, a different endonuclease can be used to target certain genomic targets. In some embodiments, synthetic SpCas9-derived variants with non-NGG PAM sequences can be used. Additionally, other Cas9 orthologues from various species have been identified and these “non-SpCas9s” can bind a variety of PAM sequences that can also be useful for the present disclosure. For example, the relatively large size of SpCas9 (approximately 4 kb coding sequence) can lead to plasmids carrying the SpCas9 cDNA that cannot be efficiently expressed in a cell. Conversely, the coding sequence for Staphylococcus aureus Cas9 (SaCas9) is approximately 1 kilobase shorter than SpCas9, possibly allowing it to be efficiently expressed in a cell. Similar to SpCas9, the SaCas9 endonuclease is capable of modifying target genes in mammalian cells in vitro and in mice in vivo. In some embodiments, a Cas protein can target a different PAM sequence. In some embodiments, a target gene can be adjacent to a Cas9 PAM, 5′-NGG, for example. In other embodiments, other Cas9 orthologs can have different PAM requirements. For example, other PAMs such as those of S. thermophilus (5′-NNAGAA for CRISPR1 and 5′-NGGNG for CRISPR3) and Neisseria meningiditis (5′-NNNNGATT) can also be found adjacent to a target gene.

[0381] In some embodiments, for a S. pyogenes system, a target gene sequence can precede (i.e., be 5′ to) a 5′-NGG PAM, and a 20-nt guide RNA sequence can base pair with an opposite strand to mediate a Cas9 cleavage adjacent to a PAM. In some embodiments, an adjacent cut can be or can be about 3 base pairs upstream of a PAM. In some embodiments, an adjacent cut can be or can be about 10 base pairs upstream of a PAM. In some embodiments, an adjacent cut can be or can be about 0-20 base pairs upstream of a PAM. For example, an adjacent cut can be next to, 1, 2, 3, 4, 5, 6, 7, 8, 9, 10, 11, 12, 13, 14, 15, 16, 17, 18, 19, 20, 21, 22, 23, 24, 25, 26, 27, 28, 29, or 30 base pairs upstream of a PAM. An adjacent cut can also be downstream of a PAM by 1 to 30 base pairs. The sequences of exemplary SpCas9 proteins capable of binding a PAM sequence follow:

[0382] The amino acid sequence of an exemplary PAM-binding SpCas9 is as follows:

(SEQ ID NO: 1)
[sequence omitted]

[0383] The amino acid sequence of an exemplary PAM-binding SpCas9n is as follows:

(SEQ ID NO: 31)
MDKKYSIGLAIGTNSVGWAVITDEYKVPSKKFKVL
GNTDRHSIKKNLIGALLFDSGETAEATRLKRTARR
RYTRRKNRICYLQEIFSNEMAKVDDSFFHRLEESF
LVEEDKKHERHPIFGNIVDEVAYHEKYPTIYHLRK
KLVDSTDKADLRLIYLALAHMIKFRGHFLIEGDLN
PDNSDVDKLFIQLVQTYNQLFEENPINASGVDAKA
ILSARLSKSRRLENLIAQLPGEKKNGLFGNLIALS
LGLTPNFKSNFDLAEDAKLQLSKDTYDDDLDNLLA
QIGDQYADLFLAAKNLSDAILLSDILRVNTEITKA
PLSASMIKRYDEHHQDLTLLKALVRQQLPEKYKEI
FFDQSKNGYAGYIDGGASQEEFYKFIKPILEKMDG
TEELLVKLNREDLLRKQRTFDNGSIPHQIHLGELH
AILRRQEDFYPFLKDNREKIEKILTFRIPYYVGPL
ARGNSRFAWMTRKSEETITPWNFEEVVDKGASAQS
FIERMTNFDKNLPNEKVLPKHSLLYEYFTVYNELT
KVKYVTEGMRKPAFLSGEQKKAIVDLLFKTNRKVT
VKQLKEDYFKKIECFDSVEISGVEDRFNASLGTYH
DLLKIIKDKDFLDNEENEDILEDIVLTLTLFEDRE
MIEERLKTYAHLFDDKVMKQLKRRRYTGWGRLSRK
LINGIRDKQSGKTILDFLKSDGFANRNFMQLIHDD
SLTFKEDIQKAQVSGQGDSLHEHIANLAGSPAIKK
GILQTVKVVDELVKVMGRHKPENIVIEMARENQTT
QKGQKNSRERMKRIEEGIKELGSQILKEHPVENTQ
LQNEKLYLYYLQNGRDMYVDQELDINRLSDYDVDH
IVPQSFLKDDSIDNKVLTRSDKNRGKSDNVPSEEV
VKKMKNYWRQLLNAKLITQRKFDNLTKAERGGLSE
LDKAGFIKRQLVETRQITKHVAQILDSRMNTKYDE
NDKLIREVKVITLKSKLVSDFRKDFQFYKVREINN
YHHAHDAYLNAVVGTALIKKYPKLESEFVYGDYKV
YDVRKMIAKSEQEIGKATAKYFFYSNIMNFFKTEI
TLANGEIRKRPLIETNGETGEIVWDKGRDFATVRK
VLSMPQVNIVKKTEVQTGGFSKESILPKRNSDKLI
ARKKDWDPKKYGGFDSPTVAYSVLVVAKVEKGKSK
KLKSVKELLGITIMERSSFEKNPIDFLEAKGYKEV
KKDLIIKLPKYSLFELENGRKRMLASAGELQKGNE
LALPSKYVNFLYLASHYEKLKGSPEDNEQKQLFVE
QHKHYLDEIIEQISEFSKRVILADANLDKVLSAYN
KHRDKPIREQAENIIHLFTLTNLGAPAAFKYFDTT
IDRKRYTSTKEVLDATLIHQSITGLYETRIDLSQL
GGD

[0384] The amino acid sequence of an exemplary PAM-binding SpEQR Cas9 is as follows:

(SEQ ID NO: 93)
MDKKYSIGLAIGTNSVGWAVITDEYKVPSKKFKVL
GNTDRHSIKKNLIGALLFDSGETAEATRLKRTARR
RYTRRKNRICYLQEIFSNEMAKVDDSFFHRLEESV
LVEEDKKHERHPIFGNIVDEVAYHEKYPTIYHLRK
KLVDSTDKADLRLIYLALAHMIKFRGHFLIEGDLN
PDNSDVDKLFIQLVQTYNQLFEENPINASGVDAKA
ILSARLSKSRRLENLIAQLPGEKKNGLFGNLIALS
LGLTPNFKSNFDLAEDAKLQLSKDTYDDDLDNLLA
QIGDQYADLFLAAKNLSDAILLSDILRVNTEITKA
PLSASMIKRYDEHHQDLTLLKALVRQQLPEKYKEI
FFDQSKNGYAGYIDGGASQEEFYKFIKPILEKMDG
TEELLVKLNREDLLRKQRTFDNGSIPHQIHLGELH
AILRRQEDFYPFLKDNREKIEKILTFRIPYYVGPL
ARGNSRFAWMTRKSEETITPWNFEEVVDKGASAQS
FIERMTNFDKNLPNEKVLPKHSLLYEYFTVYNELT
KVKYVTEGMRKPAFLSGEQKKAIVDLLFKTNRKVT
VKQLKEDYFKKIECFDSVEISGVEDRFNASLGTYH
DLLKIIKDKDFLDNEENEDILEDIVLTLTLFEDRE
MIEERLKTYAHLFDDKVMKQLKRRRYTGWGRLSRK
LINGIRDKQSGKTILDFLKSDGFANRNFMQLIHDD
SLTFKEDIQKAQVSGQGDSLHEHIANLAGSPAIKK
GILQTVKVVDELVKVMGRHKPENIVIEMARENQTT
QKGQKNSRERMKRIEEGIKELGSQILKEHPVENTQ
LQNEKLYLYYLQNGRDMYVDQELDINRLSDYDVDH
IVPQSFLKDDSIDNKVLTRSDKNRGKSDNVPSEEV
VKKMKNYWRQLLNAKLITQRKFDNLTKAERGGLSE
LDKAGFIKRQLVETRQITKHVAQILDSRMNTKYDE
NDKLIREVKVITLKSKLVSDFRKDFQFYKVREINN
YHHAHDAYLNAVVGTALIKKYPKLESEFVYGDYKV
YDVRKMIAKSEQEIGKATAKYFFYSNIMNFFKTEI
TLANGEIRKRPLIETNGETGEIVWDKGRDFATVRK
VLSMPQVNIVKKTEVQTGGFSKESILPKRNSDKLI
ARKKDWDPKKYGGFESPTVAYSVLVVAKVEKGKSK
KLKSVKELLGITIMERSSFEKNPIDFLEAKGYKEV
KKDLIIKLPKYSLFELENGRKRMLASAGELQKGNE
LALPSKYVNFLYLASHYEKLKGSPEDNEQKQLFVE
QHKHYLDEIIEQISEFSKRVILADANLDKVLSAYN
KHRDKPIREQAENIIHLFTLTNLGAPAAFKYFDTT
IDRKQYRSTKEVLDATLIHQSITGLYETRIDLSQL
GGD

[0385] In the above sequence, residues E1134, Q1334, and R1336, which can be mutated from D1134, R1335, and T1336 to yield a SpEQR Cas9, are underlined and in bold.

[0386] The amino acid sequence of an exemplary PAM-binding SpVQR Cas9 is as follows:

(SEQ ID NO: 94)
MDKKYSIGLAIGTNSVGWAVITDEYKVPSKKFKVL
GNTDRHSIKKNLIGALLFDSGETAEATRLKRTARR
RYTRRKNRICYLQEIFSNEMAKVDDSFFHRLEESF
LVEEDKKHERHPIFGNIVDEVAYHEKYPTIYHLRK
KLVDSTDKADLRLIYLALAHMIKFRGHFLIEGDLN
PDNSDVDKLFIQLVQTYNQLFEENPINASGVDAKA
ILSARLSKSRRLENLIAQLPGEKKNGLFGNLIALS
LGLTPNFKSNFDLAEDAKLQLSKDTYDDDLDNLLA
QIGDQYADLFLAAKNLSDAILLSDILRVNTEITKA
PLSASMIKRYDEHHQDLTLLKALVRQQLPEKYKEI
FFDQSKNGYAGYIDGGASQEEFYKFIKPILEKMDG
TEELLVKLNREDLLRKQRTFDNGSIPHQIHLGELH
AILRRQEDFYPFLKDNREKIEKILTFRIPYYVGPL
ARGNSRFAWMTRKSEETITPWNFEEVVDKGASAQS
FIERMTNFDKNLPNEKVLPKHSLLYEYFTVYNELT
KVKYVTEGMRKPAFLSGEQKKAIVDLLFKTNRKVT
VKQLKEDYFKKIECFDSVEISGVEDRFNASLGTYH
DLLKIIKDKDFLDNEENEDILEDIVLTLTLFEDRE
MIEERLKTYAHLFDDKVMKQLKRRRYTGWGRLSRK
LINGIRDKQSGKTILDFLKSDGFANRNFMQLIHDD
SLTFKEDIQKAQVSGQGDSLHEHIANLAGSPAIKK
GILQTVKVVDELVKVMGRHKPENIVIEMARENQTT
QKGQKNSRERMKRIEEGIKELGSQILKEHPVENTQ
LQNEKLYLYYLQNGRDMYVDQELDINRLSDYDVDH
IVPQSFLKDDSIDNKVLTRSDKNRGKSDNVPSEEV
VKKMKNYWRQLLNAKLITQRKFDNLTKAERGGLSE
LDKAGFIKRQLVETRQITKHVAQILDSRMNTKYDE
NDKLIREVKVITLKSKLVSDFRKDFQFYKVREINN
YHHAHDAYLNAVVGTALIKKYPKLESEFVYGDYKV
YDVRKMIAKSEQEIGKATAKYFFYSNIMNFFKTEI
TLANGEIRKRPLIETNGETGEIVWDKGRDFATVRK
VLSMPQVNIVKKTEVQTGGFSKESILPKRNSDKLI
ARKKDWDPKKYGGFVSPTVAYSVLVVAKVEKGKSK
KLKSVKELLGITIMERSSFEKNPIDFLEAKGYKEV
KKDLIIKLPKYSLFELENGRKRMLASAGELQKGNE
LALPSKYVNFLYLASHYEKLKGSPEDNEQKQLFVE
QHKHYLDEIIEQISEFSKRVILADANLDKVLSAYN
KHRDKPIREQAENIIHLFTLTNLGAPAAFKYFDTT
IDRKQYRSTKEVLDATLIHQSITGLYETRIDLSQL
GGD

[0387] In the above sequence, residues V1134, Q1334, and R1336, which can be mutated from D1134, R1335, and T1336 to yield a SpVQR Cas9, are underlined and in bold.

[0388] The amino acid sequence of an exemplary PAM-binding SpVRER Cas9 is as follows:

(SEQ ID NO: 95)
MDKKYSIGLAIGTNSVGWAVITDEYKVPSKKFKVL
GNTDRHSIKKNLIGALLFDSGETAEATRLKRTARR
RYTRRKNRICYLQEIFSNEMAKVDDSFFHRLEESF
LVEEDKKHERHPIFGNIVDEVAYHEKYPTIYHLRK
KLVDSTDKADLRLIYLALAHMIKFRGHFLIEGDLN
PDNSDVDKLFIQLVQTYNQLFEENPINASGVDAKA
ILSARLSKSRRLENLIAQLPGEKKNGLFGNLIALS
LGLTPNFKSNFDLAEDAKLQLSKDTYDDDLDNLLA
QIGDQYADLFLAAKNLSDAILLSDILRVNTEITKA
PLSASMIKRYDEHHQDLTLLKALVRQQLPEKYKEI
FFDQSKNGYAGYIDGGASQEEFYKFIKPILEKMDG
TEELLVKLNREDLLRKQRTFDNGSIPHQIHLGELH
AILRRQEDFYPFLKDNREKIEKILTFRIPYYVGPL
ARGNSRFAWMTRKSEETITPWNFEEVVDKGASAQS
FIERMTNFDKNLPNEKVLPKHSLLYEYFTVYNELT
KVKYVTEGMRKPAFLSGEQKKAIVDLLFKTNRKVT
VKQLKEDYFKKIECFDSVEISGVEDRFNASLGTYH
DLLKIIKDKDFLDNEENEDILEDIVLTLTLFEDRE
MIEERLKTYAHLFDDKVMKQLKRRRYTGWGRLSRK
LINGIRDKQSGKTILDFLKSDGFANRNFMQLIHDD
SLTFKEDIQKAQVSGQGDSLHEHIANLAGSPAIKK
GILQTVKVVDELVKVMGRHKPENIVIEMARENQTT
QKGQKNSRERMKRIEEGIKELGSQILKEHPVENTQ
LQNEKLYLYYLQNGRDMYVDQELDINRLSDYDVDH
IVPQSFLKDDSIDNKVLTRSDKNRGKSDNVPSEEV
VKKMKNYWRQLLNAKLITQRKFDNLTKAERGGLSE
LDKAGFIKRQLVETRQITKHVAQILDSRMNTKYDE
NDKLIREVKVITLKSKLVSDFRKDFQFYKVREINN
YHHAHDAYLNAVVGTALIKKYPKLESEFVYGDYKV
YDVRKMIAKSEQEIGKATAKYFFYSNIMNFFKTEI
TLANGEIRKRPLIETNGETGEIVWDKGRDFATVRK
VLSMPQVNIVKKTEVQTGGFSKESILPKRNSDKLI
ARKKDWDPKKYGGFVSPTVAYSVLVVAKVEKGKSK
KLKSVKELLGITIMERSSFEKNPIDFLEAKGYKEV
KKDLIIKLPKYSLFELENGRKRMLASARELQKGNE
LALPSKYVNFLYLASHYEKLKGSPEDNEQKQLFVE
QHKHYLDEIIEQISEFSKRVILADANLDKVLSAYN
KHRDKPIREQAENIIHLFTLTNLGAPAAFKYFDTT
IDRKEYRSTKEVLDATLIHQSITGLYETRIDLSQL
GGD.

[0389] In the above sequence, residues V1134, R1217, Q1334, and R1336, which can be mutated from D1134, G1217, R1335, and T1336 to yield a SpVRER Cas9, are underlined and in bold.

[0390] In some embodiments, engineered SpCas9 variants are capable of recognizing protospacer adjacent motif (PAM) sequences flanked by a 3′ H (non-G PAM) (see Tables A-D and FIG. 49). In some embodiments, the SpCas9 variants recognize NRNH PAMs (where R is A or G and H is A, C or T). In some embodiments, the non-G PAM is NRRH, NRTH, or NRCH. These variants were evolved through phage-assisted non-continuous evolution (PANCE), e.g., as described in Miller, S. M., et al. Continuous evolution of SpCas9 variants compatible with non-G PAMs, Nat. Biotechnol. (2020), (//doi.org/10.1038/s41587-020-0412-8), the contents of which are incorporated herein by reference in their entirety.

[0391] In some embodiments, the Cas9 domain is a recombinant Cas9 domain. In some embodiments, the recombinant Cas9 domain is a SpyMacCas9 domain. In some embodiments, the SpyMacCas9 domain is a nuclease active SpyMacCas9, a nuclease inactive SpyMacCas9 (SpyMacCas9d), or a SpyMacCas9 nickase (SpyMacCas9n). In some embodiments, the SaCas9 domain, the SaCas9d domain, or the SaCas9n domain can bind to a nucleic acid sequence having a non-canonical PAM. In some embodiments, the SpyMacCas9 domain, the SpCas9d domain, or the SpCas9n domain can bind to a nucleic acid sequence having a NAA PAM sequence.

[0392] The sequence of an exemplary Cas9 A homolog of Spy Cas9 in Streptococcus macacae with native 5′-NAAN-3′ PAM specificity is known in the art and described, for example, by Jakimo et al., (www.biorxiv.org/content/biorxiv/early/2018/09/27/429654.full.pdf), and is provided below.

SpyMacCas9
(SEQ ID NO: 96)
MDKKYSIGLDIGTNSVGWAVITDDYKVPSK
KFKVLGNTDRHSIKKNLIGALLFGSGETAE
ATRLKRTARRRYTRRKNRICYLQEIFSNEM
AKVDDSFFHRLEESFLVEEDKKHERHPIFG
NIVDEVAYHEKYPTIYHLRKKLADSTDKAD
LRLIYLALAHMIKFRGHFLIEGDLNPDNSD
VDKLFIQLVQIYNQLFEENPINASRVDAKA
ILSARLSKSRRLENLIAQLPGEKRNGLFGN
LIALSLGLTPNFKSNFDLAEDAKLQLSKDT
YDDDLDNLLAQIGDQYADLFLAAKNLSDAI
LLSDILRVNSEITKAPLSASMIKRYDEHHQ
DLTLLKALVRQQLPEKYKEIFFDQSKNGYA
GYIDGGASQEEFYKFIKPILEKMDGTEELL
VKLNREDLLRKQRTFDNGSIPHQIHLGELH
AILRRQEDFYPFLKDNREKIEKILTFRIPY
YVGPLARGNSRFAWMTRKSEETITPWNFEE
VVDKGASAQSFIERMTNFDKNLPNEKVLPK
HSLLYEYFTVYNELTKVKYVTEGMRKPAFL
SGEQKKAIVDLLFKTNRKVTVKQLKEDYFK
KIECFDSVEISGVEDRFNASLGAYHDLLKI
IKDKDFLDNEENEDILEDIVLTLTLFEDRG
MIEERLKTYAHLFDDKVMKQLKRRRYTGWG
RLSRKLINGIRDKQSGKTILDFLKSDGFAN
RNFMQLIHDDSLTFKEDIQKAQVSGQGHSL
HEQIANLAGSPAIKKGILQTVKIVDELVKV
MGHKPENIVIEMARENQTTQKGQKNSRERM
KRIEEGIKELGSQILKEHPVENTQLQNEKL
YLYYLQNGRDMYVDQELDINRLSDYDVDHI
VPQSFIKDDSIDNKVLTRSDKNRGKSDNVP
SEEVVKKMKNYWRQLLNAKLITQRKFDNLT
KAERGGLSELDKAGFIKRQLVETRQITKHV
AQILDSRMNTKYDENDKLIREVKVITLKSK
LVSDFRKDFQFYKVREINNYHHAHDAYLNA
VVGTALIKKYPKLESEFVYGDYKVYDVRKM
IAKSEQEIGKATAKYFFYSNIMNFFKTEIT
LANGEIRKRPLIETNGETGEIVWDKGRDFA
TVRKVLSMPQVNIVKKTEIQTVGQNGGLFD
DNPKSPLEVTPSKLVPLKKELNPKKYGGYQ
KPTTAYPVLLITDTKQLIPISVMNKKQFEQ
NPVKFLRDRGYQQVGKNDFIKLPKYTLVDI
GDGIKRLWASSKEIHKGNQLVVSKKSQILL
YHAHHLDSDLSNDYLQNHNQQFDVLFNEII
SFSKKCKLGKEHIQKIENVYSNKKNSASIE
ELAESFIKLLGFTQLGATSPFNFLGVKLNQ
KQYKGKKDYILPCTEGTLIRQSITGLYETR
VDLSKIGED.

[0393] In some embodiments, a variant Cas9 protein harbors, H840A, P475A, W476A, N477A, D1125A, W1126A, and D1218A mutations such that the polypeptide has a reduced ability to cleave a target DNA or RNA. Such a Cas9 protein has a reduced ability to cleave a target DNA (e.g., a single stranded target DNA) but retains the ability to bind a target DNA (e.g., a single stranded target DNA). As another non-limiting example, in some embodiments, the variant Cas9 protein harbors D10A, H840A, P475A, W476A, N477A, D1125A, W1126A, and D1218A mutations such that the polypeptide has a reduced ability to cleave a target DNA. Such a Cas9 protein has a reduced ability to cleave a target DNA (e.g., a single stranded target DNA) but retains the ability to bind a target DNA (e.g., a single stranded target DNA). In some embodiments, when a variant Cas9 protein harbors W476A and W1126A mutations or when the variant Cas9 protein harbors P475A, W476A, N477A, D1125A, W1126A, and D1218A mutations, the variant Cas9 protein does not bind efficiently to a PAM sequence. Thus, in some such cases, when such a variant Cas9 protein is used in a method of binding, the method does not require a PAM sequence. In other words, in some embodiments, when such a variant Cas9 protein is used in a method of binding, the method can include a guide RNA, but the method can be performed in the absence of a PAM sequence (and the specificity of binding is therefore provided by the targeting segment of the guide RNA). Other residues can be mutated to achieve the above effects (i.e., inactivate one or the other nuclease portions). As non-limiting examples, residues D10, G12, G17, E762, H840, N854, N863, H982, H983, A984, D986, and/or A987 can be altered (i.e., substituted). Also, mutations other than alanine substitutions are suitable.

[0394] In some embodiments, a CRISPR protein-derived domain of a base editor can comprise all or a portion of a Cas9 protein with a canonical PAM sequence (NGG). In other embodiments, a Cas9-derived domain of a base editor can employ a non-canonical PAM sequence. Such sequences have been described in the art and would be apparent to the skilled artisan. For example, Cas9 domains that bind non-canonical PAM sequences have been described in Kleinstiver, B. P., et al., “Engineered CRISPR-Cas9 nucleases with altered PAM specificities” Nature 523, 481-485 (2015); and Kleinstiver, B. P., et al., “Broadening the targeting range of Staphylococcus aureus CRISPR-Cas9 by modifying PAM recognition” Nature Biotechnology 33, 1293-1298 (2015); the entire contents of each are hereby incorporated by reference.

Cas9 Domains with Reduced PAM Exclusivity

[0395] Typically, Cas9 proteins, such as Cas9 from S. pyogenes (spCas9), require a canonical NGG PAM sequence to bind a particular nucleic acid region, where the “N” in “NGG” is adenosine (A), thymidine (T), or cytosine (C), and the G is guanosine. This may limit the ability to edit desired bases within a genome. In some embodiments, the base editing fusion proteins provided herein may need to be placed at a precise location, for example a region comprising a target base that is upstream of the PAM. See e.g., Komor, A. C., et al., “Programmable editing of a target base in genomic DNA without double-stranded DNA cleavage” Nature 533, 420-424 (2016), the entire contents of which are hereby incorporated by reference. Accordingly, in some embodiments, any of the fusion proteins provided herein may contain a Cas9 domain that is capable of binding a nucleotide sequence that does not contain a canonical (e.g., NGG) PAM sequence. Cas9 domains that bind to non-canonical PAM sequences have been described in the art and would be apparent to the skilled artisan. For example, Cas9 domains that bind non-canonical PAM sequences have been described in Kleinstiver, B. P., et al., “Engineered CRISPR-Cas9 nucleases with altered PAM specificities” Nature 523, 481-485 (2015); and Kleinstiver, B. P., et al., “Broadening the targeting range of Staphylococcus aureus CRISPR-Cas9 by modifying PAM recognition” Nature Biotechnology 33, 1293-1298 (2015); the entire contents of each are hereby incorporated by reference.

### High Fidelity Cas9 Domains

[0396] Some aspects of the disclosure provide high fidelity Cas9 domains. In some embodiments, high fidelity Cas9 domains are engineered Cas9 domains comprising one or more mutations that decrease electrostatic interactions between the Cas9 domain and a sugar-phosphate backbone of a DNA, as compared to a corresponding wild-type Cas9 domain. Without wishing to be bound by any particular theory, high fidelity Cas9 domains that have decreased electrostatic interactions with a sugar-phosphate backbone of DNA may have less off-target effects. In some embodiments, a Cas9 domain (e.g., a wild-type Cas9 domain) comprises one or more mutations that decreases the association between the Cas9 domain and a sugar-phosphate backbone of a DNA. In some embodiments, a Cas9 domain comprises one or more mutations that decreases the association between the Cas9 domain and a sugar-phosphate backbone of a DNA by at least 1%, at least 2%, at least 3%, at least 4%, at least 5%, at least 10%, at least 15%, at least 20%, at least 25%, at least 30%, at least 35%, at least 40%, at least 45%, at least 50%, at least 55%, at least 60%, at least 65%, or at least 70%.

[0397] In some embodiments, any of the Cas9 fusion proteins provided herein comprise one or more of a N497X, a R661X, a Q695X, and/or a Q926X mutation, or a corresponding mutation in any of the amino acid sequences provided herein, wherein X is any amino acid. In some embodiments, any of the Cas9 fusion proteins provided herein comprise one or more of a N497A, a R661A, a Q695A, and/or a Q926A mutation, or a corresponding mutation in any of the amino acid sequences provided herein. In some embodiments, the Cas9 domain comprises a D10A mutation, or a corresponding mutation in any of the amino acid sequences provided herein. Cas9 domains with high fidelity are known in the art and would be apparent to the skilled artisan. For example, Cas9 domains with high fidelity have been described in Kleinstiver, B. P., et al. “High-fidelity CRISPR-Cas9 nucleases with no detectable genome-wide off-target effects.” Nature 529, 490-495 (2016); and Slaymaker, I. M., et al. “Rationally engineered Cas9 nucleases with improved specificity.” Science 351, 84-88 (2015); the entire contents of each are incorporated herein by reference.

[0398] In some embodiments, the modified Cas9 is a high fidelity Cas9 enzyme. In some embodiments, the high fidelity Cas9 enzyme is SpCas9(K855A), eSpCas9(1.1), SpCas9-HF1, or hyper accurate Cas9 variant (HypaCas9). The modified Cas9 eSpCas9(1.1) contains alanine substitutions that weaken the interactions between the HNH/RuvC groove and the non-target DNA strand, preventing strand separation and cutting at off-target sites. Similarly, SpCas9-HF1 lowers off-target editing through alanine substitutions that disrupt Cas9's interactions with the DNA phosphate backbone. HypaCas9 contains mutations (SpCas9 N692A/M694A/Q695A/H698A) in the REC3 domain that increase Cas9 proofreading and target discrimination. All three high fidelity enzymes generate less off-target editing than wildtype Cas9. An exemplary high fidelity Cas9 is provided below.

High Fidelity Cas9 domain mutations relative to Cas9 are shown in bold and underlined:

(SEQ ID NO: 97)
DKKYSIGLAIGTNSVGWAVITDEYKVPSKKFKVLG
NTDRHSIKKNLIGALLFDSGETAEATRLKRTARRR
YTRRKNRICYLQEIFSNEMAKVDDSFFHRLEESFL
VEEDKKHERHPIFGNIVDEVAYHEKYPTIYHLRKK
LVDSTDKADLRLIYLALAHMIKFRGHFLIEGDLNP
DNSDVDKLFIQLVQTYNQLFEENPINASGVDAKAI
LSARLSKSRRLENLIAQLPGEKKNGLFGNLIALSL
GLTPNFKSNFDLAEDAKLQLSKDTYDDDLDNLLAQ
IGDQYADLFLAAKNLSDAILLSDILRVNTEITKAP
LSASMIKRYDEHHQDLTLLKALVRQQLPEKYKEIF
FDQSKNGYAGYIDGGASQEEFYKFIKPILEKMDGT
EELLVKLNREDLLRKQRTFDNGSIPHQIHLGELHA
ILRRQEDFYPFLKDNREKIEKILTFRIPYYVGPLA
RGNSRFAWMTRKSEETITPWNFEEVVDKGASAQSF
IERMTAFDKNLPNEKVLPKHSLLYEYFTVYNELTK
VKYVTEGMRKPAFLSGEQKKAIVDLLFKTNRKVTV
KQLKEDYFKKIECFDSVEISGVEDRFNASLGTYHD
LLKIIKDKDFLDNEENEDILEDIVLTLTLFEDREM
IEERLKTYAHLFDDKVMKQLKRRRYTGWGALSRKL
INGIRDKQSGKTILDFLKSDGFANRNFMALIHDDS
LTFKEDIQKAQVSGQGDSLHEHIANLAGSPAIKKG
ILQTVKVVDELVKVMGRHKPENIVIEMARENQTTQ
KGQKNSRERMKRIEEGIKELGSQILKEHPVENTQL
QNEKLYLYYLQNGRDMYVDQELDINRLSDYDVDHI
VPQSFLKDDSIDNKVLTRSDKNRGKSDNVPSEEVV
KKMKNYWRQLLNAKLITQRKFDNLTKAERGGLSEL
DKAGFIKRQLVETRAITKHVAQILDSRMNTKYDEN
DKLIREVKVITLKSKLVSDFRKDFQFYKVREINNY
HHAHDAYLNAVVGTALIKKYPKLESEFVYGDYKVY
DVRKMIAKSEQEIGKATAKYFFYSNIMNFFKTEIT
LANGEIRKRPLIETNGETGEIVWDKGRDFATVRKV
LSMPQVNIVKKTEVQTGGFSKESILPKRNSDKLIA
RKKDWDPKKYGGFDSPTVAYSVLVVAKVEKGKSKK
LKSVKELLGITIMERSSFEKNPIDFLEAKGYKEVK
KDLIIKLPKYSLFELENGRKRMLASAGELQKGNEL
ALPSKYVNFLYLASHYEKLKGSPEDNEQKQLFVEQ
HKHYLDEIIEQISEFSKRVILADANLDKVLSAYNK
HRDKPIREQAENIIHLFTLTNLGAPAAFKYFDTTI
DRKRYTSTKEVLDATLIHQSITGLYETRIDLSQLG
GD

### Fusion Proteins Comprising a Nuclear Localization Sequence (NLS)

[0399] In some embodiments, the fusion proteins provided herein further comprise one or more (e.g., 2, 3, 4, 5) nuclear targeting sequences, for example a nuclear localization sequence (NLS). In one embodiment, a bipartite NLS is used. In some embodiments, a NLS comprises an amino acid sequence that facilitates the importation of a protein, that comprises an NLS, into the cell nucleus (e.g., by nuclear transport). In some embodiments, any of the fusion proteins provided herein further comprise a nuclear localization sequence (NLS). In some embodiments, the NLS is fused to the N-terminus of the fusion protein. In some embodiments, the NLS is fused to the C-terminus of the fusion protein. In some embodiments, the NLS is fused to the N-terminus of the Cas9 domain. In some embodiments, the NLS is fused to the C-terminus of an nCas9 domain or a dCas9 domain. In some embodiments, the NLS is fused to the N-terminus of the deaminase. In some embodiments, the NLS is fused to the C-terminus of the deaminase. In some embodiments, the NLS is fused to the fusion protein via one or more linkers. In some embodiments, the NLS is fused to the fusion protein without a linker. In some embodiments, the NLS comprises an amino acid sequence of any one of the NLS sequences provided or referenced herein. Additional nuclear localization sequences are known in the art and would be apparent to the skilled artisan. For example, NLS sequences are described in Plank et al., PCT/EP2000/011690, the contents of which are incorporated herein by reference for their disclosure of exemplary nuclear localization sequences. In some embodiments, an NLS comprises the amino acid sequence PKKKRKVEGADKRTADGSEFESPKKKRKV (SEQ ID NO: 98), KRTADGSEFESPKKKRKV (SEQ ID NO: 68), KRPAATKKAGQAKKKK (SEQ ID NO: 69), KKTELQTTNAENKTKKL (SEQ ID NO: 70), KRGINDRNFWRGENGRKTR (SEQ ID NO: 71), RKSGKIAAIVVKRPRKPKKKRKV (SEQ ID NO: 99), or MDSLLMNRRKFLYQFKNVRWAKGRRETYLC (SEQ ID NO: 74).

[0400] In some embodiments, the NLS is present in a linker or the NLS is flanked by linkers, for example, the linkers described herein. In some embodiments, the N-terminus or C-terminus NLS is a bipartite NLS. A bipartite NLS comprises two basic amino acid clusters, which are separated by a relatively short spacer sequence (hence bipartite—2 parts, while monopartite NLSs are not). The NLS of nucleoplasmin, KR[PAATKKAGQA]KKKK (SEQ ID NO: 100), is the prototype of the ubiquitous bipartite signal: two clusters of basic amino acids, separated by a spacer of about 10 amino acids. The sequence of an exemplary bipartite NLS follows: PKKKRKVEGADKRTADGSEFESPKKKRKV (SEQ ID NO: 98)

[0401] In some embodiments, the fusion proteins of the invention do not comprise a linker sequence. In some embodiments, linker sequences between one or more of the domains or proteins are present.

[0402] It should be appreciated that the fusion proteins of the present disclosure may comprise one or more additional features. For example, in some embodiments, the fusion protein may comprise inhibitors, cytoplasmic localization sequences, export sequences, such as nuclear export sequences, or other localization sequences, as well as sequence tags that are useful for solubilization, purification, or detection of the fusion proteins. Suitable protein tags provided herein include, but are not limited to, biotin carboxylase carrier protein (BCCP) tags, myc-tags, calmodulin-tags, FLAG-tags, hemagglutinin (HA)-tags, polyhistidine tags, also referred to as histidine tags or His-tags, maltose binding protein (MBP)-tags, nus-tags, glutathione-S-transferase (GST)-tags, green fluorescent protein (GFP)-tags, thioredoxin-tags, S-tags, Softags (e.g., Softag 1, Softag 3), strep-tags, biotin ligase tags, FlAsH tags, V5 tags, and SBP-tags. Additional suitable sequences will be apparent to those of skill in the art. In some embodiments, the fusion protein comprises one or more His tags.

[0403] A vector that encodes a CRISPR enzyme comprising one or more nuclear localization sequences (NLSs) can be used. For example, there can be or be about 1, 2, 3, 4, 5, 6, 7, 8, 9, 10 NLSs used. A CRISPR enzyme can comprise the NLSs at or near the ammo-terminus, about or more than about 1, 2, 3, 4, 5, 6, 7, 8, 9, 10 NLSs at or near the carboxy-terminus, or any combination of these (e.g., one or more NLS at the ammo-terminus and one or more NLS at the carboxy terminus). When more than one NLS is present, each can be selected independently of others, such that a single NLS can be present in more than one copy and/or in combination with one or more other NLSs present in one or more copies.

[0404] CRISPR enzymes used in the methods can comprise about 6 NLSs. An NLS is considered near the N- or C-terminus when the nearest amino acid to the NLS is within about 50 amino acids along a polypeptide chain from the N- or C-terminus, e.g., within 1, 2, 3, 4, 5, 10, 15, 20, 25, 30, 40, or 50 amino acids.

### Nucleobase Editing Domain

[0405] Described herein are base editors comprising a fusion protein that includes a polynucleotide programmable nucleotide binding domain and a nucleobase editing domain (e.g., a deaminase domain). The base editor can be programmed to edit one or more bases in a target polynucleotide sequence by interacting with a guide polynucleotide capable of recognizing the target sequence. Once the target sequence has been recognized, the base editor is anchored on the polynucleotide where editing is to occur, and the deaminase domain components of the base editor can then edit a target base.

[0406] In some embodiments, the nucleobase editing domain includes a deaminase domain. As particularly described herein, the deaminase domain includes an adenosine deaminase. In some embodiments, the terms “adenine deaminase” and “adenosine deaminase” can be used interchangeably. Details of nucleobase editing proteins are described in International PCT Application Nos. PCT/2017/045381 (WO2018/027078) and PCT/US2016/058344 (WO2017/070632), each of which is incorporated herein by reference for its entirety. Also see Komor, A. C., et al., “Programmable editing of a target base in genomic DNA without double-stranded DNA cleavage” Nature 533, 420-424 (2016); Gaudelli, N. M., et al., “Programmable base editing of A•T to G•C in genomic DNA without DNA cleavage” Nature 551, 464-471 (2017); and Komor, A. C., et al., “Improved base excision repair inhibition and bacteriophage Mu Gam protein yields C:G-to-T:A base editors with higher efficiency and product purity” Science Advances 3:eaao4774 (2017), the entire contents of which are hereby incorporated by reference.

### A to G Editing

[0407] In some embodiments, a base editor described herein can comprise a deaminase domain which includes an adenosine deaminase. Such an adenosine deaminase domain of a base editor can facilitate the editing of an adenine (A) nucleobase to a guanine (G) nucleobase by deaminating the A to form inosine (I), which exhibits base pairing properties of G. Adenosine deaminase is capable of deaminating (i.e., removing an amine group) adenine of a deoxyadenosine residue in deoxyribonucleic acid (DNA).

[0408] In some embodiments, the nucleobase editors provided herein can be made by fusing together one or more protein domains, thereby generating a fusion protein. In certain embodiments, the fusion proteins provided herein comprise one or more features that improve the base editing activity (e.g., efficiency, selectivity, and specificity) of the fusion proteins. For example, the fusion proteins provided herein can comprise a Cas9 domain that has reduced nuclease activity. In some embodiments, the fusion proteins provided herein can have a Cas9 domain that does not have nuclease activity (dCas9), or a Cas9 domain that cuts one strand of a duplexed DNA molecule, referred to as a Cas9 nickase (nCas9). Without wishing to be bound by any particular theory, the presence of the catalytic residue (e.g., H840) maintains the activity of the Cas9 to cleave the non-edited (e.g., non-deaminated) strand containing a T opposite the targeted A. Mutation of the catalytic residue (e.g., D10 to A10) of Cas9 prevents cleavage of the edited strand containing the targeted A residue. Such Cas9 variants are able to generate a single-strand DNA break (nick) at a specific location based on the gRNA-defined target sequence, leading to repair of the non-edited strand, ultimately resulting in a T to C change on the non-edited strand. In some embodiments, an A-to-G base editor further comprises an inhibitor of inosine base excision repair, for example, a uracil glycosylase inhibitor (UGI) domain or a catalytically inactive inosine specific nuclease. Without wishing to be bound by any particular theory, the UGI domain or catalytically inactive inosine specific nuclease can inhibit or prevent base excision repair of a deaminated adenosine residue (e.g., inosine), which can improve the activity or efficiency of the base editor.

[0409] A base editor comprising an adenosine deaminase can act on any polynucleotide, including DNA, RNA and DNA-RNA hybrids. In certain embodiments, a base editor comprising an adenosine deaminase can deaminate a target A of a polynucleotide comprising RNA. For example, the base editor can comprise an adenosine deaminase domain capable of deaminating a target A of an RNA polynucleotide and/or a DNA-RNA hybrid polynucleotide. In an embodiment, an adenosine deaminase incorporated into a base editor comprises all or a portion of adenosine deaminase acting on RNA (ADAR, e.g., ADAR1 or ADAR2). In another embodiment, an adenosine deaminase incorporated into a base editor comprises all or a portion of adenosine deaminase acting on tRNA (ADAT). A base editor comprising an adenosine deaminase domain can also be capable of deaminating an A nucleobase of a DNA polynucleotide. In an embodiment an adenosine deaminase domain of a base editor comprises all or a portion of an ADAT comprising one or more mutations which permit the ADAT to deaminate a target A in DNA. For example, the base editor can comprise all or a portion of an ADAT from Escherichia coli (EcTadA) comprising one or more of the following mutations: D108N, A106V, D147Y, E155V, L84F, H123Y, I156F, or a corresponding mutation in another adenosine deaminase.

[0410] The adenosine deaminase can be derived from any suitable organism (e.g., E. coli). In some embodiments, the adenine deaminase is a naturally-occurring adenosine deaminase that includes one or more mutations corresponding to any of the mutations provided herein (e.g., mutations in ecTadA). The corresponding residue in any homologous protein can be identified by e.g., sequence alignment and determination of homologous residues. The mutations in any naturally-occurring adenosine deaminase (e.g., having homology to ecTadA) that corresponds to any of the mutations described herein (e.g., any of the mutations identified in ecTadA) can be generated accordingly.

### Adenosine Deaminases

[0411] In some embodiments, a base editor described herein can comprise a deaminase domain which includes an adenosine deaminase. Such an adenosine deaminase domain of a base editor can facilitate the editing of an adenine (A) nucleobase to a guanine (G) nucleobase by deaminating the A to form inosine (I), which exhibits base pairing properties of G. Adenosine deaminase is capable of deaminating (i.e., removing an amine group) adenine of a deoxyadenosine residue in deoxyribonucleic acid (DNA).

[0412] In some embodiments, the adenosine deaminases provided herein are capable of deaminating adenine. In some embodiments, the adenosine deaminases provided herein are capable of deaminating adenine in a deoxyadenosine residue of DNA. In some embodiments, the adenine deaminase is a naturally-occurring adenosine deaminase that includes one or more mutations corresponding to any of the mutations provided herein (e.g., mutations in ecTadA). One of skill in the art will be able to identify the corresponding residue in any homologous protein, e.g., by sequence alignment and determination of homologous residues. Accordingly, one of skill in the art would be able to generate mutations in any naturally-occurring adenosine deaminase (e.g., having homology to ecTadA) that corresponds to any of the mutations described herein, e.g., any of the mutations identified in ecTadA. In some embodiments, the adenosine deaminase is from a prokaryote. In some embodiments, the adenosine deaminase is from a bacterium. In some embodiments, the adenosine deaminase is from Escherichia coli, Staphylococcus aureus, Salmonella typhi, Shewanella putrefaciens, Haemophilus influenzae, Caulobacter crescentus, or Bacillus subtilis. In some embodiments, the adenosine deaminase is from E. coli.

[0413] The invention provides adenosine deaminase variants that have increased efficiency (>50-60%) and specificity. In particular, the adenosine deaminase variants described herein are more likely to edit a desired base within a polynucleotide and are less likely to edit bases that are not intended to be altered (i.e., “bystanders”).

[0414] In particular embodiments, the TadA is any one of the TadA described in PCT/US2017/045381 (WO 2018/027078), which is incorporated herein by reference in its entirety.

[0415] In some embodiments, the nucleobase editors of the invention are adenosine deaminase variants comprising an alteration in the following sequence:

(SEQ ID NO: 2)
MSEVEFSHEYWMRHALTLAKRARDEREVPVGAVLVLNNRVIGEGWNRAI
GLHDPTAHAEIMALRQGGLVMQNYRLIDATLYVTFEPCVMCAGAMIHSR
IGRVVFGVRNAKTGAAGSLMDVLHYPGMNHRVEITEGILADECAALLCY
FFRMPRQVFNAQKKAQSSTD (also termed TadA*7.10).

[0416] In particular embodiments, the fusion proteins comprise a single (e.g., provided as a monomer) TadA*8 variant. In some embodiments, the TadA*8 is linked to a Cas9 nickase. In some embodiments, the fusion proteins of the invention comprise as a heterodimer of a wild-type TadA (TadA(wt)) linked to a TadA*8 variant. In other embodiments, the fusion proteins of the invention comprise as a heterodimer of a TadA*7.10 linked to a TadA*8 variant. In some embodiments, the base editor is ABE8 comprising a TadA*8 variant monomer. In some embodiments, the base editor is ABE8 comprising a heterodimer of a TadA*8 variant and a TadA(wt). In some embodiments, the base editor is ABE8 comprising a heterodimer of a TadA*8 variant and TadA*7.10. In some embodiments, the base editor is ABE8 comprising a heterodimer of a TadA*8 variant. In some embodiments, the TadA*8 variant is selected from Table 7. In some embodiments, the ABE8 is selected from Table 7. The relevant sequences follow:

Wild-type TadA (TadA(wt)) or ″the TadA reference
sequence″
(SEQ ID NO: 101)
MSEVEFSHEYWMRHALTLAKRAWDEREVPVGAVLVHNNRVIGEGWNRPI
GRHDPTAHAEIMALRQGGLVMQNYRLIDATLYVTLEPCVMCAGAMIHSR
IGRVVFGARDAKTGAAGSLMDVLHHPGMNHRVEITEGILADECAALLSD
FFRMRRQEIKAQKKAQSSTD

### TadA*7.10:

(SEQ ID NO: 2)
MSEVEFSHEYW MRHALTLAKR ARDEREVPVG AVLVLNNRVI
GEGWNRAIGL HDPTAHAEIM ALRQGGLVMQ NYRLIDATLY
VTFEPCVMCA GAMIHSRIGR VVFGVRNAKT GAAGSLMDVL
HYPGMNHRVE ITEGILADEC AALLCYFFRM PRQVFNAQKK
AQSSTD

[0418] In some embodiments, the adenosine deaminase comprises an amino acid sequence that is at least 60%, at least 65%, at least 70%, at least 75%, at least 80%, at least 85%, at least 90%, at least 95%, at least 96%, at least 97%, at least 98%, at least 99%, or at least 99.5% identical to any one of the amino acid sequences set forth in any of the adenosine deaminases provided herein. It should be appreciated that adenosine deaminases provided herein may include one or more mutations (e.g., any of the mutations provided herein). The disclosure provides any deaminase domains with a certain percent identity plus any of the mutations or combinations thereof described herein. In some embodiments, the adenosine deaminase comprises an amino acid sequence that has 1, 2, 3, 4, 5, 6, 7, 8, 9, 10, 11, 12, 13, 14, 15, 16, 17, 18, 19, 20, 21, 22, 21, 24, 25, 26, 27, 28, 29, 30, 31, 32, 33, 34, 35, 36, 37, 38, 39, 40, 41, 42, 43, 44, 45, 46, 47, 48, 49, 50, or more mutations compared to a reference sequence, or any of the adenosine deaminases provided herein. In some embodiments, the adenosine deaminase comprises an amino acid sequence that has at least 5, at least 10, at least 15, at least 20, at least 25, at least 30, at least 35, at least 40, at least 45, at least 50, at least 60, at least 70, at least 80, at least 90, at least 100, at least 110, at least 120, at least 130, at least 140, at least 150, at least 160, or at least 170 identical contiguous amino acid residues as compared to any one of the amino acid sequences known in the art or described herein.

[0419] In some embodiments the TadA deaminase is a full-length E. coli TadA deaminase. For example, in certain embodiments, the adenosine deaminase comprises the amino acid sequence:

(SEQ ID NO: 102)
MRRAFITGVFFLSEVEFSHEYWMRHALTLAKRAWDEREVPVGAVLVHNN
RVIGEGWNRPIGRHDPTAHAEIMALRQGGLVMQNYRLIDATLYVTLEPC
VMCAGAMIHSRIGRVVFGARDAKTGAAGSLMDVLHHPGMNHRVEITEGI
LADECAALLSDFFRMRRQEIKAQKKAQSSTD.

[0420] It should be appreciated, however, that additional adenosine deaminases useful in the present application would be apparent to the skilled artisan and are within the scope of this disclosure. For example, the adenosine deaminase may be a homolog of adenosine deaminase acting on tRNA (ADAT). Without limitation, the amino acid sequences of exemplary AD AT homologs include the following:

Staphylococcus aureus TadA:

(SEQ ID NO: 18)
MGSHMTNDIYFMTLAIEEAKKAAQLGEVPIGAIITKDDEVIARAHNLRE
TLQQPTAHAEHIAIERAAKVLGSWRLEGCTLYVTLEPCVMCAGTIVMSR
IPRVVYGADDPKGGCSGSLMNLLQQSNFNHRAIVDKGVLKEACSTLLTT
FFKNLRANKKSTN

Bacillus subtilis TadA:

(SEQ ID NO: 19)
MIQDELYMKEAIKEAKKAEEKGEVPIGAVLVINGETIARAHNLRETEQR
SIAHAEMLVIDEACKALGTWRLEGATLYVTLEPCPMCAGAVVLSRVEKV
VFGAFDPKGGCSGTLMNLLQEERFNHQAEVVSGVLEEECGGMLSAFFRE
LRKKKKAARKNLSE

Salmonella typhimurium (S. typhimurium) TadA:

(SEQ ID NO: 20)
MPPAFITGVISLSDVELDHEYWMRHALTLAKRAWDEREVPVGAVLVHNH
RVIGEGWNRPIGRHDPTAHAEIMALRQGGLVLQNYRLLDTTLYVTLEPC
VMCAGAMVHSRIGRVVFGARDAKTGAAGSLIDVLHHPGMNHRVEIIEGV
LRDECAILLSDFFRMRRQEIKALKKADRAEGAGPAV

Shewanella putrefaciens (S. putrefaciens) TadA:

(SEQ ID NO: 21)
MDEYWMQVAMQMAEKAEAAGEVPVGAVLVKDGQQIATGYNLSISQHDPT
AHAEILCLRSAGKKLENYRLLDATLYITLEPCAMCAGAMVHSRIARVVY
GARDEKTGAAGTVVNLLQHPAFNHQVEVTSGVLAEACSAQLSRFFKRRR
DEKKALKLAQRAQQGIE

Haemophilus influenzae F3031 (H. influenzae) TadA:

(SEQ ID NO: 22)
MDAAKVRSEFDEKMMRYALELADKAEALGEIPVGAVLVDDARNIIGEGW
NLSIVQSDPTAHAEIIALRNGAKNIQNYRLLNSTLYVTLEPCTMCAGAI
LHSRIKRLVFGASDYKTGAIGSRFHFFDDYKMNHTLEITSGVLAEECSQ
KLSTFFQKRREEKKIEKALLKSLSDK

Caulobacter crescentus (C. crescentus) TadA:

(SEQ ID NO: 23)
MRTDESEDQDHRMMRLALDAARAAAEAGETPVGAVILDPSTGEVIATAG
NGPIAAHDPTAHAEIAAMRAAAAKLGNYRLTDLTLVVTLEPCAMCAGAI
SHARIGRVVFGADDPKGGAVVHGPKFFAQPTCHWRPEVTGGVLADESAD
LLRGFFRARRKAKI

Geobacter sulfurreducens (G. sulfurreducens) TadA:

(SEQ ID NO: 24)
MSSLKKTPIRDDAYWMGKAIREAAKAAARDEVPIGAVIVRDGAVIGRGHN
LREGSNDPSAHAEMIAIRQAARRSANWRLTGATLYVTLEPCLMCMGAIIL
ARLERVVFGCYDPKGGAAGSLYDLSADPRLNHQVRLSPGVCQEECGTMLS
DFFRDLRRRKKAKATPALFIDERKVPPEP

An embodiment of E. Coli TadA (ecTadA) includes the following:

(SEQ ID NO: 103)
MSEVEFSHEYWMRHALTLAKRARDEREVPVGAVLVLNNRVIGEGWNRAIG
LHDPTAHAEIMALRQGGLVMQNYRLIDATLYVTFEPCVMCAGAMIHSRIG
RVVFGVRNAKTGAAGSLMDVLHYPGMNHRVEITEGILADECAALLCYFFR
MPRQVFNAQKKAQSSTD

[0421] In some embodiments, the adenosine deaminase is from a prokaryote. In some embodiments, the adenosine deaminase is from a bacterium. In some embodiments, the adenosine deaminase is from Escherichia coli, Staphylococcus aureus, Salmonella typhi, Shewanella putrefaciens, Haemophilus influenzae, Caulobacter crescentus, or Bacillus subtilis. In some embodiments, the adenosine deaminase is from E. coli.

[0422] In one embodiment, a fusion protein of the invention comprises a wild-type TadA linked to TadA7.10, which is linked to Cas9 nickase. In particular embodiments, the fusion proteins comprise a single TadA7.10 domain (e.g., provided as a monomer). In other embodiments, the ABE7.10 editor comprises TadA7.10 and TadA(wt), which are capable of forming heterodimers.

[0423] In some embodiments, the adenosine deaminase comprises an amino acid sequence that is at least 60%, at least 65%, at least 70%, at least 75%, at least 80%, at least 85%, at least 90%, at least 95%, at least 96%, at least 97%, at least 98%, at least 99%, or at least 99.5% identical to any one of the amino acid sequences set forth in any of the adenosine deaminases provided herein. It should be appreciated that adenosine deaminases provided herein may include one or more mutations (e.g., any of the mutations provided herein). The disclosure provides any deaminase domains with a certain percent identity plus any of the mutations or combinations thereof described herein. In some embodiments, the adenosine deaminase comprises an amino acid sequence that has 1, 2, 3, 4, 5, 6, 7, 8, 9, 10, 11, 12, 13, 14, 15, 16, 17, 18, 19, 20, 21, 22, 21, 24, 25, 26, 27, 28, 29, 30, 31, 32, 33, 34, 35, 36, 37, 38, 39, 40, 41, 42, 43, 44, 45, 46, 47, 48, 49, 50, or more mutations compared to a reference sequence, or any of the adenosine deaminases provided herein. In some embodiments, the adenosine deaminase comprises an amino acid sequence that has at least 5, at least 10, at least 15, at least 20, at least 25, at least 30, at least 35, at least 40, at least 45, at least 50, at least 60, at least 70, at least 80, at least 90, at least 100, at least 110, at least 120, at least 130, at least 140, at least 150, at least 160, or at least 170 identical contiguous amino acid residues as compared to any one of the amino acid sequences known in the art or described herein.

[0424] It should be appreciated that any of the mutations provided herein (e.g., based on the TadA reference sequence) can be introduced into other adenosine deaminases, such as E. coli TadA (ecTadA), S. aureus TadA (saTadA), or other adenosine deaminases (e.g., bacterial adenosine deaminases). It would be apparent to the skilled artisan that additional deaminases may similarly be aligned to identify homologous amino acid residues that can be mutated as provided herein. Thus, any of the mutations identified in the TadA reference sequence can be made in other adenosine deaminases (e.g., ecTada) that have homologous amino acid residues. It should also be appreciated that any of the mutations provided herein can be made individually or in any combination in the TadA reference sequence or another adenosine deaminase.

[0425] In some embodiments, the adenosine deaminase comprises a D108X mutation in the TadA reference sequence, or a corresponding mutation in another adenosine deaminase (e.g., ecTadA), where X indicates any amino acid other than the corresponding amino acid in the wild-type adenosine deaminase. In some embodiments, the adenosine deaminase comprises a D108G, D108N, D108V, D108A, or D108Y mutation, or a corresponding mutation in another adenosine deaminase.

[0426] In some embodiments, the adenosine deaminase comprises an A106X mutation in TadA reference sequence, or a corresponding mutation in another adenosine deaminase (e.g., ecTadA), where X indicates any amino acid other than the corresponding amino acid in the wild-type adenosine deaminase. In some embodiments, the adenosine deaminase comprises an A106V mutation in TadA reference sequence, or a corresponding mutation in another adenosine deaminase (e.g., wild type TadA or ecTadA).

[0427] In some embodiments, the adenosine deaminase comprises a E155X mutation in TadA reference sequence, or a corresponding mutation in another adenosine deaminase (e.g., ecTadA), where the presence of X indicates any amino acid other than the corresponding amino acid in the wild-type adenosine deaminase. In some embodiments, the adenosine deaminase comprises a E155D, E155G, or E155V mutation in TadA reference sequence, or a corresponding mutation in another adenosine deaminase (e.g., ecTadA).

[0428] In some embodiments, the adenosine deaminase comprises a D147X mutation in TadA reference sequence, or a corresponding mutation in another adenosine deaminase (e.g., ecTadA), where the presence of X indicates any amino acid other than the corresponding amino acid in the wild-type adenosine deaminase. In some embodiments, the adenosine deaminase comprises a D147Y, mutation in TadA reference sequence, or a corresponding mutation in another adenosine deaminase (e.g., ecTadA).

[0429] In some embodiments, the adenosine deaminase comprises an A106X, E155X, or D147X, mutation in the TadA reference sequence, or a corresponding mutation in another adenosine deaminase (e.g., ecTadA), where X indicates any amino acid other than the corresponding amino acid in the wild-type adenosine deaminase. In some embodiments, the adenosine deaminase comprises an E155D, E155G, or E155V mutation. In some embodiments, the adenosine deaminase comprises a D147Y.

[0430] For example, an adenosine deaminase can contain a D108N, a A106V, a E155V, and/or a D147Y mutation in TadA reference sequence, or a corresponding mutation in another adenosine deaminase (e.g., ecTadA). In some embodiments, an adenosine deaminase comprises the following group of mutations (groups of mutations are separated by a “;”) in TadA reference sequence, or corresponding mutations in another adenosine deaminase (e.g., ecTadA): D108N and A106V; D108N and E155V; D108N and D147Y; A106V and E155V; A106V and D147Y; E155V and D147Y; D108N, A106V, and E155V; D108N, A106V, and D147Y; D108N, E155V, and D147Y; A106V, E155V, and D 147Y; and D108N, A106V, E155V, and D147Y. It should be appreciated, however, that any combination of corresponding mutations provided herein can be made in an adenosine deaminase (e.g., ecTadA).

[0431] In some embodiments, the adenosine deaminase comprises one or more of a H8X, T17X, L18X, W23X, L34X, W45X, R51X, A56X, E59X, E85X, M94X, I95X, V102X, F104X, A106X, R107X, D108X, K110X, M118X, N127X, A138X, F149X, M151X, R153X, Q154X, I156X, and/or K157X mutation in TadA reference sequence, or one or more corresponding mutations in another adenosine deaminase (e.g., ecTadA), where the presence of X indicates any amino acid other than the corresponding amino acid in the wild-type adenosine deaminase. In some embodiments, the adenosine deaminase comprises one or more of H8Y, T17S, L18E, W23L, L34S, W45L, R51H, A56E, or A56S, E59G, E85K, or E85G, M94L, I95L, V102A, F104L, A106V, R107C, or R107H, or R107P, D108G, or D108N, or D108V, or D108A, or D108Y, K110I, M118K, N127S, A138V, F149Y, M151V, R153C, Q154L, I156D, and/or K157R mutation in TadA reference sequence, or one or more corresponding mutations in another adenosine deaminase (e.g., ecTadA).

[0432] In some embodiments, the adenosine deaminase comprises one or more of a H8X, D108X, and/or N127X mutation in TadA reference sequence, or one or more corresponding mutations in another adenosine deaminase (e.g., ecTadA), where X indicates the presence of any amino acid. In some embodiments, the adenosine deaminase comprises one or more of a H8Y, D108N, and/or N127S mutation in TadA reference sequence, or one or more corresponding mutations in another adenosine deaminase (e.g., ecTadA).

[0433] In some embodiments, the adenosine deaminase comprises one or more of H8X, R26X, M61X, L68X, M70X, A106X, D108X, A109X, N127X, D147X, R152X, Q154X, E155X, K161X, Q163X, and/or T166X mutation in TadA reference sequence, or one or more corresponding mutations in another adenosine deaminase (e.g., ecTadA), where X indicates the presence of any amino acid other than the corresponding amino acid in the wild-type adenosine deaminase. In some embodiments, the adenosine deaminase comprises one or more of H8Y, R26W, M61I, L68Q, M70V, A106T, D108N, A109T, N127S, D147Y, R152C, Q154H or Q154R, E155G or E155V or E155D, K161Q, Q163H, and/or T166P mutation in the TadA reference sequence, or one or more corresponding mutations in another adenosine deaminase (e.g., ecTadA).

[0434] In some embodiments, the adenosine deaminase comprises one, two, three, four, five, or six mutations selected from the group consisting of H8X, D108X, N127X, D147X, R152X, and Q154X in TadA reference sequence, or a corresponding mutation or mutations in another adenosine deaminase (e.g., ecTadA), where X indicates the presence of any amino acid other than the corresponding amino acid in the wild-type adenosine deaminase. In some embodiments, the adenosine deaminase comprises one, two, three, four, five, six, seven, or eight mutations selected from the group consisting of H8X, M61X, M70X, D108X, N127X, Q154X, E155X, and Q163X in the TadA reference sequence, or a corresponding mutation or mutations in another adenosine deaminase (e.g., ecTadA), where X indicates the presence of any amino acid other than the corresponding amino acid in the wild-type adenosine deaminase. In some embodiments, the adenosine deaminase comprises one, two, three, four, or five, mutations selected from the group consisting of H8X, D108X, N127X, E155X, and T166X in TadA reference sequence, or a corresponding mutation or mutations in another adenosine deaminase (e.g., ecTadA), where X indicates the presence of any amino acid other than the corresponding amino acid in the wild-type adenosine deaminase.

[0435] In some embodiments, the adenosine deaminase comprises one, two, three, four, five, or six mutations selected from the group consisting of H8X, A106X, D108X, mutation or mutations in another adenosine deaminase, where X indicates the presence of any amino acid other than the corresponding amino acid in the wild-type adenosine deaminase. In some embodiments, the adenosine deaminase comprises one, two, three, four, five, six, seven, or eight mutations selected from the group consisting of H8X, R26X, L68X, D108X, N127X, D147X, and E155X, or a corresponding mutation or mutations in another adenosine deaminase, where X indicates the presence of any amino acid other than the corresponding amino acid in the wild-type adenosine deaminase. In some embodiments, the adenosine deaminase comprises one, two, three, four, or five, mutations selected from the group consisting of H8X, D108X, A109X, N127X, and E155X in TadA reference sequence, or a corresponding mutation or mutations in another adenosine deaminase (e.g., ecTadA), where X indicates the presence of any amino acid other than the corresponding amino acid in the wild-type adenosine deaminase.

[0436] In some embodiments, the adenosine deaminase comprises one, two, three, four, five, or six mutations selected from the group consisting of H8Y, D108N, N127S, D147Y, R152C, and Q154H in TadA reference sequence, or a corresponding mutation or mutations in another adenosine deaminase (e.g., ecTadA). In some embodiments, the adenosine deaminase comprises one, two, three, four, five, six, seven, or eight mutations selected from the group consisting of H8Y, M61I, M70V, D108N, N127S, Q154R, E155G and Q163H in TadA reference sequence, or a corresponding mutation or mutations in another adenosine deaminase (e.g., ecTadA). In some embodiments, the adenosine deaminase comprises one, two, three, four, or five, mutations selected from the group consisting of H8Y, D108N, N127S, E155V, and T166P in TadA reference sequence, or a corresponding mutation or mutations in another adenosine deaminase (e.g., ecTadA). In some embodiments, the adenosine deaminase comprises one, two, three, four, five, or six mutations selected from the group consisting of H8Y, A106T, D108N, N127S, E155D, and K161Q in TadA reference sequence, or a corresponding mutation or mutations in another adenosine deaminase (e.g., ecTadA). In some embodiments, the adenosine deaminase comprises one, two, three, four, five, six, seven, or eight mutations selected from the group consisting of H8Y, R26W, L68Q, D108N, N127S, D147Y, and E155V in TadA reference sequence, or a corresponding mutation or mutations in another adenosine deaminase (e.g., ecTadA). In some embodiments, the adenosine deaminase comprises one, two, three, four, or five, mutations selected from the group consisting of H8Y, D108N, A109T, N127S, and E155G in TadA reference sequence, or a corresponding mutation or mutations in another adenosine deaminase (e.g., ecTadA).

[0437] Any of the mutations provided herein and any additional mutations (e.g., based on the ecTadA amino acid sequence) can be introduced into any other adenosine deaminases. Any of the mutations provided herein can be made individually or in any combination in TadA reference sequence or another adenosine deaminase (e.g., ecTadA).

[0438] Details of A to G nucleobase editing proteins are described in International PCT Application No. PCT/2017/045381 (WO2018/027078) and Gaudelli, N. M., et al., “Programmable base editing of A•T to G•C in genomic DNA without DNA cleavage” Nature, 551, 464-471 (2017), the entire contents of which are hereby incorporated by reference.

[0439] In some embodiments, the adenosine deaminase comprises one or more corresponding mutations in another adenosine deaminase (e.g., ecTadA). In some embodiments, the adenosine deaminase comprises a D108N, D108G, or D108V mutation in TadA reference sequence, or corresponding mutations in another adenosine deaminase (e.g., ecTadA). In some embodiments, the adenosine deaminase comprises a A106V and D108N mutation in TadA reference sequence, or corresponding mutations in another adenosine deaminase (e.g., ecTadA). In some embodiments, the adenosine deaminase comprises R107C and D108N mutations in TadA reference sequence, or corresponding mutations in another adenosine deaminase (e.g., ecTadA). In some embodiments, the adenosine deaminase comprises a H8Y, D108N, N127S, D147Y, and Q154H mutation in TadA reference sequence, or corresponding mutations in another adenosine deaminase (e.g., ecTadA). In some embodiments, the adenosine deaminase comprises a H8Y, D108N, N127S, D147Y, and E155V mutation in TadA reference sequence, or corresponding mutations in another adenosine deaminase (e.g., ecTadA). In some embodiments, the adenosine deaminase comprises a D108N, D147Y, and E155V mutation in TadA reference sequence, or corresponding mutations in another adenosine deaminase (e.g., ecTadA). In some embodiments, the adenosine deaminase comprises a H8Y, D108N, and N127S mutation in TadA reference sequence, or corresponding mutations in another adenosine deaminase (e.g., ecTadA). In some embodiments, the adenosine deaminase comprises a A106V, D108N, D147Y and E155V mutation in TadA reference sequence, or corresponding mutations in another adenosine deaminase (e.g., ecTadA).

[0440] In some embodiments, the adenosine deaminase comprises one or more of a S2X, H8X, I49X, L84X, H123X, N127X, I156X and/or K160X mutation in TadA reference sequence, or one or more corresponding mutations in another adenosine deaminase, where the presence of X indicates any amino acid other than the corresponding amino acid in the wild-type adenosine deaminase. In some embodiments, the adenosine deaminase comprises one or more of S2A, H8Y, I49F, L84F, H123Y, N127S, I156F and/or K160S mutation in TadA reference sequence, or one or more corresponding mutations in another adenosine deaminase (e.g., ecTadA).

[0441] In some embodiments, the adenosine deaminase comprises an L84X mutation adenosine deaminase, where X indicates any amino acid other than the corresponding amino acid in the wild-type adenosine deaminase. In some embodiments, the adenosine deaminase comprises an L84F mutation in TadA reference sequence, or a corresponding mutation in another adenosine deaminase (e.g., ecTadA).

[0442] In some embodiments, the adenosine deaminase comprises an H123X mutation in TadA reference sequence, or a corresponding mutation in another adenosine deaminase (e.g., ecTadA), where X indicates any amino acid other than the corresponding amino acid in the wild-type adenosine deaminase. In some embodiments, the adenosine deaminase comprises an H123Y mutation in TadA reference sequence, or a corresponding mutation in another adenosine deaminase (e.g., ecTadA).

[0443] In some embodiments, the adenosine deaminase comprises an I156X mutation in TadA reference sequence, or a corresponding mutation in another adenosine deaminase (e.g., ecTadA), where X indicates any amino acid other than the corresponding amino acid in the wild-type adenosine deaminase. In some embodiments, the adenosine deaminase comprises an I156F mutation in TadA reference sequence, or a corresponding mutation in another adenosine deaminase (e.g., ecTadA).

[0444] In some embodiments, the adenosine deaminase comprises one, two, three, four, five, six, or seven mutations selected from the group consisting of L84X, A106X, D108X, H123X, D147X, E155X, and I156X in TadA reference sequence, or a corresponding mutation or mutations in another adenosine deaminase (e.g., ecTadA), where X indicates the presence of any amino acid other than the corresponding amino acid in the wild-type adenosine deaminase. In some embodiments, the adenosine deaminase comprises one, two, three, four, five, or six mutations selected from the group consisting of S2X, I49X, A106X, D108X, D147X, and E155X in TadA reference sequence, or a corresponding mutation or mutations in another adenosine deaminase (e.g., ecTadA), where X indicates the presence of any amino acid other than the corresponding amino acid in the wild-type adenosine deaminase. In some embodiments, the adenosine deaminase comprises one, two, three, four, or five, mutations selected from the group consisting of H8X, A106X, D108X, N127X, and K160X in TadA reference sequence, or a corresponding mutation or mutations in another adenosine deaminase (e.g., ecTadA), where X indicates the presence of any amino acid other than the corresponding amino acid in the wild-type adenosine deaminase.

[0445] In some embodiments, the adenosine deaminase comprises one, two, three, four, five, six, or seven mutations selected from the group consisting of L84F, A106V, D108N, H123Y, D147Y, E155V, and I156F in TadA reference sequence, or a corresponding mutation or mutations in another adenosine deaminase (e.g., ecTadA). In some embodiments, the adenosine deaminase comprises one, two, three, four, five, or six mutations selected from the group consisting of S2A, I49F, A106V, D108N, D147Y, and E155V in TadA reference sequence.

[0446] In some embodiments, the adenosine deaminase comprises one, two, three, four, or five, mutations selected from the group consisting of H8Y, A106T, D108N, N127S, and K160S in TadA reference sequence, or a corresponding mutation or mutations in another adenosine deaminase (e.g., ecTadA).

[0447] In some embodiments, the adenosine deaminase comprises one or more of a E25X, R26X, R107X, A142X, and/or A143X mutation in TadA reference sequence, or one or more corresponding mutations in another adenosine deaminase (e.g., ecTadA), where the presence of X indicates any amino acid other than the corresponding amino acid in the wild-type adenosine deaminase. In some embodiments, the adenosine deaminase comprises one or more of E25M, E25D, E25A, E25R, E25V, E25S, E25Y, R26G, R26N, R26Q, R26C, R26L, R26K, R107P, R107K, R107A, R107N, R107W, R107H, R107S, A142N, A142D, A142G, A143D, A143G, A143E, A143L, A143W, A143M, A143S, A143Q and/or A143R mutation in TadA reference sequence, or one or more corresponding mutations in another adenosine deaminase (e.g., ecTadA). In some embodiments, the adenosine deaminase comprises one or more of the mutations described herein corresponding to TadA reference sequence, or one or more corresponding mutations in another adenosine deaminase (e.g., ecTadA).

[0448] In some embodiments, the adenosine deaminase comprises an E25X mutation in TadA reference sequence, or a corresponding mutation in another adenosine deaminase (e.g., ecTadA), where X indicates any amino acid other than the corresponding amino acid in the wild-type adenosine deaminase. In some embodiments, the adenosine deaminase comprises an E25M, E25D, E25A, E25R, E25V, E25S, or E25Y mutation in TadA reference sequence, or a corresponding mutation in another adenosine deaminase (e.g., ecTadA).

[0449] In some embodiments, the adenosine deaminase comprises an R26X mutation in TadA reference sequence, or a corresponding mutation in another adenosine deaminase (e.g., ecTadA), where X indicates any amino acid other than the corresponding amino acid in the wild-type adenosine deaminase. In some embodiments, the adenosine deaminase comprises R26G, R26N, R26Q, R26C, R26L, or R26K mutation in TadA reference sequence, or a corresponding mutation in another adenosine deaminase (e.g., ecTadA).

[0450] In some embodiments, the adenosine deaminase comprises an R107X mutation in TadA reference sequence, or a corresponding mutation in another adenosine deaminase (e.g., ecTadA), where X indicates any amino acid other than the corresponding amino acid in the wild-type adenosine deaminase. In some embodiments, the adenosine deaminase comprises an R107P, R107K, R107A, R107N, R107W, R107H, or R107S mutation in TadA reference sequence, or a corresponding mutation in another adenosine deaminase (e.g., ecTadA).

[0451] In some embodiments, the adenosine deaminase comprises an A142X mutation in TadA reference sequence, or a corresponding mutation in another adenosine deaminase (e.g., ecTadA), where X indicates any amino acid other than the corresponding amino acid in the wild-type adenosine deaminase. In some embodiments, the adenosine deaminase comprises an A142N, A142D, A142G, mutation in TadA reference sequence, or a corresponding mutation in another adenosine deaminase (e.g., ecTadA).

[0452] In some embodiments, the adenosine deaminase comprises an A143X mutation in TadA reference sequence, or a corresponding mutation in another adenosine deaminase (e.g., ecTadA), where X indicates any amino acid other than the corresponding amino acid in the wild-type adenosine deaminase. In some embodiments, the adenosine deaminase comprises an A143D, A143G, A143E, A143L, A143W, A143M, A143S, A143Q and/or A143R mutation in TadA reference sequence, or a corresponding mutation in another adenosine deaminase (e.g., ecTadA).

[0453] In some embodiments, the adenosine deaminase comprises one or more of a H36X, N37X, P48X, I49X, R51X, M70X, N72X, D77X, E134X, S146X, Q154X, K157X, and/or K161X mutation in TadA reference sequence, or one or more corresponding mutations in another adenosine deaminase (e.g., ecTadA), where the presence of X indicates any amino acid other than the corresponding amino acid in the wild-type adenosine deaminase. In some embodiments, the adenosine deaminase comprises one or more of H36L, N37T, N37S, P48T, P48L, I49V, R51H, R51L, M70L, N72S, D77G, E134G, S146R, S146C, Q154H, K157N, and/or K161T mutation in TadA reference sequence, or one or more corresponding mutations in another adenosine deaminase (e.g., ecTadA).

[0454] In some embodiments, the adenosine deaminase comprises an H36X mutation in TadA reference sequence, or a corresponding mutation in another adenosine deaminase (e.g., ecTadA), where X indicates any amino acid other than the corresponding amino acid in the wild-type adenosine deaminase. In some embodiments, the adenosine deaminase comprises an H36L mutation in TadA reference sequence, or a corresponding mutation in another adenosine deaminase (e.g., ecTadA).

[0455] In some embodiments, the adenosine deaminase comprises an N37X mutation in TadA reference sequence, or a corresponding mutation in another adenosine deaminase (e.g., ecTadA), where X indicates any amino acid other than the corresponding amino acid in the wild-type adenosine deaminase. In some embodiments, the adenosine deaminase comprises an N37T, or N37S mutation in TadA reference sequence, or a corresponding mutation in another adenosine deaminase (e.g., ecTadA).

[0456] In some embodiments, the adenosine deaminase comprises an P48X mutation in TadA reference sequence, or a corresponding mutation in another adenosine deaminase (e.g., ecTadA), where X indicates any amino acid other than the corresponding amino acid in the wild-type adenosine deaminase. In some embodiments, the adenosine deaminase comprises an P48T, or P48L mutation in TadA reference sequence, or a corresponding mutation in another adenosine deaminase (e.g., ecTadA).

[0457] In some embodiments, the adenosine deaminase comprises an R51X mutation in TadA reference sequence, or a corresponding mutation in another adenosine deaminase, where X indicates any amino acid other than the corresponding amino acid in the wild-type adenosine deaminase. In some embodiments, the adenosine deaminase comprises an R51H, or R51L mutation in TadA reference sequence, or a corresponding mutation in another adenosine deaminase (e.g., ecTadA).

[0458] In some embodiments, the adenosine deaminase comprises an S146X mutation in TadA reference sequence, or a corresponding mutation in another adenosine deaminase (e.g., ecTadA), where X indicates any amino acid other than the corresponding amino acid in the wild-type adenosine deaminase. In some embodiments, the adenosine deaminase comprises an S146R, or S146C mutation in TadA reference sequence, or a corresponding mutation in another adenosine deaminase (e.g., ecTadA).

[0459] In some embodiments, the adenosine deaminase comprises an K157X mutation in TadA reference sequence, or a corresponding mutation in another adenosine deaminase (e.g., ecTadA), where X indicates any amino acid other than the corresponding amino acid in the wild-type adenosine deaminase. In some embodiments, the adenosine deaminase comprises a K157N mutation in TadA reference sequence, or a corresponding mutation in another adenosine deaminase (e.g., ecTadA).

[0460] In some embodiments, the adenosine deaminase comprises an P48X mutation in TadA reference sequence, or a corresponding mutation in another adenosine deaminase (e.g., ecTadA), where X indicates any amino acid other than the corresponding amino acid in the wild-type adenosine deaminase. In some embodiments, the adenosine deaminase comprises a P48S, P48T, or P48A mutation in TadA reference sequence, or a corresponding mutation in another adenosine deaminase (e.g., ecTadA).

[0461] In some embodiments, the adenosine deaminase comprises an A142X mutation in TadA reference sequence, or a corresponding mutation in another adenosine deaminase (e.g., ecTadA), where X indicates any amino acid other than the corresponding amino acid in the wild-type adenosine deaminase. In some embodiments, the adenosine deaminase comprises a A142N mutation in TadA reference sequence, or a corresponding mutation in another adenosine deaminase (e.g., ecTadA).

[0462] In some embodiments, the adenosine deaminase comprises an W23X mutation in TadA reference sequence, or a corresponding mutation in another adenosine deaminase (e.g., ecTadA), where X indicates any amino acid other than the corresponding amino acid in the wild-type adenosine deaminase. In some embodiments, the adenosine deaminase comprises a W23R, or W23L mutation in TadA reference sequence, or a corresponding mutation in another adenosine deaminase (e.g., ecTadA).

[0463] In some embodiments, the adenosine deaminase comprises an R152X mutation in TadA reference sequence, or a corresponding mutation in another adenosine deaminase (e.g., ecTadA), where X indicates any amino acid other than the corresponding amino acid in the wild-type adenosine deaminase. In some embodiments, the adenosine deaminase comprises a R152P, or R52H mutation in TadA reference sequence, or a corresponding mutation in another adenosine deaminase (e.g., ecTadA).

[0464] In one embodiment, the adenosine deaminase may comprise the mutations H36L, R51L, L84F, A106V, D108N, H123Y, S146C, D147Y, E155V, I156F, and K157N. In some embodiments, the adenosine deaminase comprises the following combination of mutations relative to TadA reference sequence, where each mutation of a combination is separated by a “_” and each combination of mutations is between parentheses:

### (A106V_D108N),

### (R107C_D108N),

### (H8Y_D108N_N127S_D147Y_Q154H),

### (H8Y_D108N_N127S_D147Y_E155V),

### (D108N_D147Y_E155V),

### (H8Y_D108N_N127S),

### (H8Y_D108N_N127S_D147Y_Q154H),

### (A106V_D108N_D147Y_E155V),

### (D108Q_D147Y_E155V),

### (D108M_D147Y_E155V),

### (D108L_D147Y_E155V),

### (D108K_D147Y_E155V),

### (D108I_D147Y_E155V),

### (D108F_D147Y_E155V),

### (A106V_D108N_D147Y),

### (A106V_D108M_D147Y_E155V),

### (E59A_A106V_D108N_D147Y_E155V),

[0465] (E59A cat dead_A106V_D108N_D147Y_E155V),

### (L84F_A106V_D108N_H123Y_D147Y_E155V_I156Y),

### (L84F_A106V_D108N_H123Y_D147Y_E155V_I156F),

### (D103A_D104N),

### (G22P_D103A_D104N),

### (D103A_D104N_S138A),

### (R26G_L84F_A106V_R107H_D108N_H123Y_A142N_A143D_D147Y_E155V_I156F),

### (E25G_R26G_L84F_A106V_R107H_D108N_H123Y_A142N_A143D_D147Y_E155V_I156F),

### (E25D_R26G_L84F_A106V_R107K_D108N_H123Y_A142N_A143G_D147Y_E155V_I156F),

### (R26Q_L84F_A106V_D108N_H123Y_A142N_D147Y_E155V_I156F),

### (E25M_R26G_L84F_A106V_R107P_D108N_H123Y_A142N_A143D_D147Y_E155V I156F),

### (R26C_L84F_A106V_R107H_D108N_H123Y_A142N_D147Y_E155V_I156F),

### (L84F_A106V_D108N_H123Y_A142N_A143L_D147Y_E155V_I156F),

### (R26G_L84F_A106V_D108N_H123Y_A142N_D147Y_E155V_I156F),

### (E25A_R26G_L84F_A106V_R107N_D108N_H123Y_A142N_A143E_D147Y_E155V I156F),

### (R26G_L84F_A106V_R107H_D108N_H123Y_A142N_A143D_D147Y_E155V_I156F),

### (A106V_D108N_A142N_D147Y_E155V),

### (R26G_A106V_D108N_A142N_D147Y_E155V),

### (E25D_R26G_A106V_R107K_D108N_A142N_A143G_D147Y_E155V),

### (R26G_A106V_D108N_R107H_A142N_A143D_D147Y_E155V),

### (E25D_R26G_A106V_D108N_A142N_D147Y_E155V),

### (A106V_R107K_D108N_A142N_D147Y_E155V),

### (A106V_D108N_A142N_A143G_D147Y_E155V),

### (A106V_D108N_A142N_A143L_D147Y_E155V),

### (H36L_R51L_L84F_A106V_D108N_H123Y_S146C_D147Y_E155V_I156F_K157N),

### (N37T_P48T_M70L_L84F_A106V_D108N_H123Y_D147Y_I49V_E155V_I156F),

### (N37S_L84F_A106V_D108N_H123Y_D147Y_E155V_I156F_K161T),

### (H36L_L84F_A106V_D108N_H123Y_D147Y_Q154H_E155V_I156F),

### (N72S_L84F_A106V_D108N_H123Y_S146R_D147Y_E155V_I156F),

### (H36L_P48L_L84F_A106V_D108N_H123Y_E134G_D147Y_E155V_I156F),

### (H36L_L84F_A106V_D108N_H123Y_D147Y_E155V_I156F_K157N),

### (H36L_L84F_A106V_D108N_H123Y_S146C_D147Y_E155V_I156F),

### (L84F_A106V_D108N_H123Y_S146R_D147Y_E155V_I156F_K161T),

### (N37S_R51H_D77G_L84F_A106V_D108N_H123Y_D147Y_E155V_I156F),

### (R51L_L84F_A106V_D108N_H123Y_D147Y_E155V_I156F_K157N),

### (D24G_Q71R_L84F_H96L_A106V_D108N_H123Y_D147Y_E155V_I156F_K160E),

### (H36L_G67V_L84F_A106V_D108N_H123Y_S146T_D147Y_E155V_I156F),

### (Q71L_L84F_A106V_D108N_H123Y_L137M_A143E_D147Y_E155V_I156F),

### (E25G_L84F_A106V_D108N_H123Y_D147Y_E155V_I156F_Q159L),

### (L84F_A91T_F104I_A106V_D108N_H123Y_D147Y_E155V_I156F),

### (N72D_L84F_A106V_D108N_H123Y_G125A_D147Y_E155V_I156F),

### (P48S_L84F_S97C_A106V_D108N_H123Y_D147Y_E155V_I156F),

### (W23G_L84F_A106V_D108N_H123Y_D147Y_E155V_I156F),

### (D24G_P48L_Q71R_L84F_A106V_D108N_H123Y_D147Y_E155V_I156F_Q159L),

### (L84F_A106V_D108N_H123Y_A142N_D147Y_E155V_I156F),

### (H36L_R51L_L84F_A106V_D108N_H123Y_A142N_S146C_D147Y_E155V_I156F_K157N), (N37S_L84F_A106V_D108N_H123Y_A142N_D147Y_E155V_I156F_K161T),

### (L84F_A106V_D108N_D147Y_E155V_I156F),

### (R51L_L84F_A106V_D108N_H123Y_S146C_D147Y_E155V_I156F_K157N_K161T),

### (L84F_A106V_D108N_H123Y_S146C_D147Y_E155V_I156F_K161T),

### (L84F_A106V_D108N_H123Y_S146C_D147Y_E155V_I156F_K157N_K160E_K161T),

### (L84F_A106V_D108N_H123Y_S146C_D147Y_E155V_I156F_K157N_K160E),

### (R74Q_L84F_A106V_D108N_H123Y_D147Y_E155V_I156F),

### (R74A_L84F_A106V_D108N_H123Y_D147Y_E155V_I156F),

### (L84F_A106V_D108N_H123Y_D147Y_E155V_I156F),

### (R74Q_L84F_A106V_D108N_H123Y_D147Y_E155V_I156F),

### (L84F_R98Q_A106V_D108N_H123Y_D147Y_E155V_I156F),

### (L84F_A106V_D108N_H123Y_R129Q_D147Y_E155V_I156F),

### (P48S_L84F_A106V_D108N_H123Y_A142N_D147Y_E155V_I156F),

### (P48S_A142N),

### (P48T_I49V_L84F_A106V_D108N_H123Y_A142N_D147Y_E155V_I156F_L157N),

### (P48T_I49V_A142N),

### (H36L_P48S_R51L_L84F_A106V_D108N_H123Y_S146C_D147Y_E155V_I156F_K157N),

### (H36L_P48S_R51L_L84F_A106V_D108N_H123Y_S146C_A142N_D147Y_E155V_I156F

### (H36L_P48T_I49V_R51L_L84F_A106V_D108N_H123Y_S146C_D147Y_E155V_I156F_K157N),

### (H36L_P48T_I49V_R51L_L84F_A106V_D108N_H123Y_A142N_S146C_D147Y_E155V_I156F_K157N),

### (H36L_P48A_R51L_L84F_A106V_D108N_H123Y_S146C_D147Y_E155V_I156F_K157N),

### (H36L_P48A_R51L_L84F_A106V_D108N_H123Y_A142N_S146C_D147Y_E155V_I156F_K157N),

### (H36L_P48A_R51L_L84F_A106V_D108N_H123Y_S146C_A142N_D147Y_E155V_I156F_K157N),

### (W23L_H36L_P48A_R51L_L84F_A106V_D108N_H123Y_S146C_D147Y_E155V_I156F K157N),

### (W23R_H36L_P48A_R51L_L84F_A106V_D108N_H123Y_S146C_D147Y_E155V_I156F_K157N),

### (W23L_H36L_P48A_R51L_L84F_A106V_D108N_H123Y_S146R_D147Y_E155V_I156F_K161T),

### (H36L_P48A_R51L_L84F_A106V_D108N_H123Y_S146C_D147Y_R152H_E155V_I156F_K157N),

### (H36L_P48A_R51L_L84F_A106V_D108N_H123Y_S146C_D147Y_R152P_E155V_I156F_K157N),

### (W23L_H36L_P48A_R51L_L84F_A106V_D108N_H123Y_S146C_D147Y_R152P_E155V_I156F_K157N),

### (W23L_H36L_P48A_R51L_L84F_A106V_D108N_H123Y_A142A_S146C_D147Y_E155V_I156F_K157N),

### (W23L_H36L_P48A_R51L_L84F_A106V_D108N_H123Y_A142A_S146C_D147Y_R152P_E155V_I156F_K157N),

### (W23L_H36L_P48A_R51L_L84F_A106V_D108N_H123Y_S146R_D147Y_E155V_I156F_K161T),

### (W23R_H36L_P48A_R51L_L84F_A106V_D108N_H123Y_S146C_D147Y_R152P_E155V_I156F_K157N),

### (H36L_P48A_R51L_L84F_A106V_D108N_H123Y_A142N_S146C_D147Y_R152P_E155V_I156F_K157N).

[0466] In certain embodiments, the fusion proteins provided herein comprise one or more features that improve the base editing activity of the fusion proteins. For example, any of the fusion proteins provided herein may comprise a Cas9 domain that has reduced nuclease activity. In some embodiments, any of the fusion proteins provided herein may have a Cas9 domain that does not have nuclease activity (dCas9), or a Cas9 domain that cuts one strand of a duplexed DNA molecule, referred to as a Cas9 nickase (nCas9).

[0467] In some embodiments, the adenosine deaminase is TadA*7.10. In some embodiments, TadA*7.10 comprises at least one alteration. In particular embodiments, TadA*7.10 comprises one or more of the following alterations or additional alterations to TadA*7.10: Y147T, Y147R, Q154S, Y123H, V82S, T166R, and Q154R. The alteration Y123H is also referred to herein as H123H (the alteration H123Y in TadA*7.10 reverted back to Y123H (wt)). In other embodiments, the TadA*7.10 comprises a combination of alterations selected from the group of: Y147T+Q154R; Y147T+Q154S; Y147R+Q154S; V82S+Q154S; V82S+Y147R; V82S+Q154R; V82S+Y123H; I76Y+V82S; V82S+Y123H+Y147T; V82S+Y123H+Y147R; V82S+Y123H+Q154R; Y147R+Q154R+Y123H; Y147R+Q154R+I76Y; Y147R+Q154R+T166R; Y123H+Y147R+Q154R+I76Y; V82S+Y123H+Y147R+Q154R; and I76Y+V82S+Y123H+Y147R+Q154R. In particular embodiments, an adenosine deaminase variant comprises a deletion of the C terminus beginning at residue 149, 150, 151, 152, 153, 154, 155, 156, and 157.

[0468] In other embodiments, a base editor of the invention is a monomer comprising an adenosine deaminase variant (e.g., TadA*8) comprising one or more of the following alterations: Y147T, Y147R, Q154S, Y123H, V82S, T166R, and/or Q154R, relative to TadA7.10 or the TadA reference sequence. In other embodiments, the adenosine deaminase variant (TadA*8) is a monomer comprising a combination of alterations selected from the group of: Y147T+Q154R; Y147T+Q154S; Y147R+Q154S; V82S+Q154S; V82S+Y147R; V82S+Q154R; V82S+Y123H; I76Y+V82S; V82S+Y123H+Y147T; V82S+Y123H+Y147R; V82S+Y123H+Q154R; Y147R+Q154R+Y123H; Y147R+Q154R+I76Y; Y147R+Q154R+T166R; Y123H+Y147R+Q154R+I76Y; V82S+Y123H+Y147R+Q154R; and I76Y+V82S+Y123H+Y147R+Q154R. In other embodiments, a base editor is a heterodimer comprising a wild-type adenosine deaminase and an adenosine deaminase variant (e.g., TadA*8) comprising one or more of the following alterations Y147T, Y147R, Q154S, Y123H, V82S, T166R, and/or Q154R, relative to TadA7.10 or the TadA reference sequence. In other embodiments, the base editor is a heterodimer comprising a TadA*7.10 domain and an adenosine deaminase variant domain (e.g., TadA*8) comprising a combination of alterations selected from the group of: Y147T+Q154R; Y147T+Q154S; Y147R+Q154S; V82S+Q154S; V82S+Y147R; V82S+Q154R; V82S+Y123H; I76Y+V82S; V82S+Y123H+Y147T; V82S+Y123H+Y147R; V82S+Y123H+Q154R; Y147R+Q154R+Y123H; Y147R+Q154R+I76Y; Y147R+Q154R+T166R; Y123H+Y147R+Q154R+I76Y; V82S+Y123H+Y147R+Q154R; and I76Y+V82S+Y123H+Y147R+Q154R.

[0469] In one embodiment, an adenosine deaminase is a TadA*8 that comprises or consists essentially of the following sequence or a fragment thereof having adenosine deaminase activity:

(SEQ ID NO: 17)
MSEVEFSHEYWMRHALTLAKRARDEREVPVGAVLVLNNRVIGEGWNRAIG
LHDPTAHAEIMALRQGGLVMQNYRLIDATLYVTFEPCVMCAGAMIHSRIG
RVVFGVRNAKTGAAGSLMDVLHYPGMNHRVEITEGILADECAALLCTFR
MPRQVFNAQKKAQSSTD

[0470] In some embodiments, the TadA*8 is a truncated. In some embodiments, the truncated TadA*8 is missing 1, 2, 3, 4, 5, 6, 7, 8, 9, 10, 11, 12, 13, 14, 15, 6, 17, 18, 19, or 20 N-terminal amino acid residues relative to the full length TadA*8. In some embodiments, the truncated TadA*8 is missing 1, 2, 3, 4, 5, 6, 7, 8, 9, 10, 11, 12, 13, 14, 15, 6, 17, 18, 19, or 20 C-terminal amino acid residues relative to the full length TadA*8. In some embodiments the adenosine deaminase variant is a full-length TadA*8.

[0471] In some embodiments the TadA*8 is TadA*8.1, TadA*8.2, TadA*8.3, TadA*8.4, TadA*8.5, TadA*8.6, TadA*8.7, TadA*8.8, TadA*8.9, TadA*8.10, TadA*8.11, TadA*8.12, TadA*8.13, TadA*8.14, TadA*8.15, TadA*8.16, TadA*8.17, TadA*8.18, TadA*8.19, TadA*8.20, TadA*8.21, TadA*8.22, TadA*8.23, TadA*8.24.

[0472] In one embodiment, a fusion protein of the invention comprises a wild-type TadA is linked to an adenosine deaminase variant described herein (e.g., TadA*8), which is linked to Cas9 nickase. In particular embodiments, the fusion proteins comprise a single TadA*8 domain (e.g., provided as a monomer). In other embodiments, the base editor comprises TadA*8 and TadA(wt), which are capable of forming heterodimers. Exemplary sequences follow: TadA(wt), “the TadA reference sequence”:

(SEQ ID NO: 101)
MSEVEFSHEYWMRHALTLAKRAWDEREVPVGAVLVHNNRVIGEGWNRPIG
RHDPTAHAEIMALRQGGLVMQNYRLIDATLYVTLEPCVMCAGAMIHSRIG
RVVFGARDAKTGAAGSLMDVLHHPGMNHRVEITEGILADECAALLSDFFR
MRRQEIKAQKKAQSSTD

### TadA*7.10:

(SEQ ID NO: 2)
MSEVEFSHEYWMRHALTLAKRARDEREVPVGAVLVLNNRVIGEGWNRAIG
LHDPTAHAEIMALRQGGLVMQNYRLIDATLYVTFEPCVMCAGAMIHSRIG
RVVFGVRNAKTGAAGSLMDVLHYPGMNHRVEITEGILADECAALLCYFFR
MPRQVFNAQKKAQSSTD

### TadA*8:

(SEQ ID NO: 17)
MSEVEFSHEYWMRHALTLAKRARDEREVPVGAVLVLNNRVIGEGWNRAIG
LHDPTAHAEIMALRQGGLVMQNYRLIDATLYVTFEPCVMCAGAMIHSRIG
RVVFGVRNAKTGAAGSLMDVLHYPGMNHRVEITEGILADECAALLCTFFR
MPRQVFNAQKKAQSSTD.

[0475] In some embodiments, the adenosine deaminase comprises an amino acid sequence that is at least 60%, at least 65%, at least 70%, at least 75%, at least 80%, at least 85%, at least 90%, at least 95%, at least 96%, at least 97%, at least 98%, at least 99%, or at least 99.5% identical to any one of the amino acid sequences set forth in any of the adenosine deaminases provided herein. It should be appreciated that adenosine deaminases provided herein may include one or more mutations (e.g., any of the mutations provided herein). The disclosure provides any deaminase domains with a certain percent identity plus any of the mutations or combinations thereof described herein. In some embodiments, the adenosine deaminase comprises an amino acid sequence that has 1, 2, 3, 4, 5, 6, 7, 8, 9, 10, 11, 12, 13, 14, 15, 16, 17, 18, 19, 20, 21, 22, 21, 24, 25, 26, 27, 28, 29, 30, 31, 32, 33, 34, 35, 36, 37, 38, 39, 40, 41, 42, 43, 44, 45, 46, 47, 48, 49, 50, or more mutations compared to a reference sequence, or any of the adenosine deaminases provided herein. In some embodiments, the adenosine deaminase comprises an amino acid sequence that has at least 5, at least 10, at least 15, at least 20, at least 25, at least 30, at least 35, at least 40, at least 45, at least 50, at least 60, at least 70, at least 80, at least 90, at least 100, at least 110, at least 120, at least 130, at least 140, at least 150, at least 160, or at least 170 identical contiguous amino acid residues as compared to any one of the amino acid sequences known in the art or described herein.

[0476] In particular embodiments, a TadA*8 comprises one or more mutations at any of the following positions shown in bold. In other embodiments, a TadA*8 comprises one or more mutations at any of the positions shown with underlining: MSEVEFSHEY WMRHALTLAK RARDEREVPV GAVLVLNNRV IGEGWNRAIG ⁵⁰ LHDPTAHAEI MALRQGGLVM QNYRLIDATL YVTFEPCVMC AGAMIHSRIG ¹⁰⁰ RVVFGVRNAK TGAAGSLMDV LHYPGMNHRV EITEGILADE CAALLCYFFR ¹⁵⁰ MPRQVFNAQK KAQSSTD (SEQ ID NO: 2)

[0477] For example, the TadA*8 comprises alterations at amino acid position 82 and/or 166 (e.g., V82S, T166R) alone or in combination with any one or more of the following Y147T, Y147R, Q154S, Y123H, and/or Q154R, relative to TadA7.10 or wtTadA, or a corresponding sequence thereof. In particular embodiments, a combination of alterations are selected from the group of: Y147T+Q154R; Y147T+Q154S; Y147R+Q154S; V82S+Q154S; V82S+Y147R; V82S+Q154R; V82S+Y123H; I76Y+V82S; V82S+Y123H+Y147T; V82S+Y123H+Y147R; V82S+Y123H+Q154R; Y147R+Q154R+Y123H; Y147R+Q154R+I76Y; Y147R+Q154R+T166R; Y123H+Y147R+Q154R+I76Y; V82S+Y123H+Y147R+Q154R; and I76Y+V82S+Y123H+Y147R+Q154R.

[0478] In some embodiments, the adenosine deaminase is TadA*8, which comprises or consists essentially of the following sequence or a fragment thereof having adenosine deaminase activity:

(SEQ ID NO: 17)
MSEVEFSHEY WMRHALTLAK RARDEREVPV GAVLVLNNRV
IGEGWNRAIG LHDPTAHAEI MALRQGGLVM QNYRLIDATL
YVTFEPCVMC AGAMIHSRIG RVVFGVRNAK TGAAGSLMDV
LHYPGMNHRV EITEGILADE CAALLCTFFR MPRQVFNAQK
KAQSSTD

[0479] In some embodiments, the TadA*8 is truncated. In some embodiments, the truncated TadA*8 is missing 1, 2, 3, 4, 5, 6, 7, 8, 9, 10, 11, 12, 13, 14, 15, 6, 17, 18, 19, or 20 N-terminal amino acid residues relative to the full length TadA*8. In some embodiments, the truncated TadA*8 is missing 1, 2, 3, 4, 5, 6, 7, 8, 9, 10, 11, 12, 13, 14, 15, 6, 17, 18, 19, or 20 C-terminal amino acid residues relative to the full length TadA*8. In some embodiments the adenosine deaminase variant is a full-length TadA*8.

[0480] In one embodiment, a fusion protein of the invention comprises a wild-type TadA is linked to an adenosine deaminase variant described herein (e.g., TadA*8), which is linked to Cas9 nickase. In particular embodiments, the fusion proteins comprise a single TadA*8 domain (e.g., provided as a monomer). In other embodiments, the base editor comprises TadA*8 and TadA(wt), which are capable of forming heterodimers.

### Additional Domains

[0481] A base editor described herein can include any domain which helps to facilitate the nucleobase editing, modification or altering of a nucleobase of a polynucleotide. In some embodiments, a base editor comprises a polynucleotide programmable nucleotide binding domain (e.g., Cas9), a nucleobase editing domain (e.g., deaminase domain), and one or more additional domains. In some embodiments, the additional domain can facilitate enzymatic or catalytic functions of the base editor, binding functions of the base editor, or be inhibitors of cellular machinery (e.g., enzymes) that could interfere with the desired base editing result. In some embodiments, a base editor can comprise a nuclease, a nickase, a recombinase, a deaminase, a methyltransferase, a methylase, an acetylase, an acetyltransferase, a transcriptional activator, or a transcriptional repressor domain.

[0482] In some embodiments, a base editor can comprise an uracil glycosylase inhibitor (UGI) domain. In some embodiments, cellular DNA repair response to the presence of U: G heteroduplex DNA can be responsible for a decrease in nucleobase editing efficiency in cells. In such embodiments, uracil DNA glycosylase (UDG) can catalyze removal of U from DNA in cells, which can initiate base excision repair (BER), mostly resulting in reversion of the U:G pair to a C:G pair. In such embodiments, BER can be inhibited in base editors comprising one or more domains that bind the single strand, block the edited base, inhibit UGI, inhibit BER, protect the edited base, and/or promote repairing of the non-edited strand. Thus, this disclosure contemplates a base editor fusion protein comprising a UGI domain.

[0483] In some embodiments, a base editor comprises as a domain all or a portion of a double-strand break (DSB) binding protein. For example, a DSB binding protein can include a Gam protein of bacteriophage Mu that can bind to the ends of DSBs and can protect them from degradation. See Komor, A. C., et al., “Improved base excision repair inhibition and bacteriophage Mu Gam protein yields C:G-to-T:A base editors with higher efficiency and product purity” Science Advances 3:eaao4774 (2017), the entire content of which is hereby incorporated by reference.

[0484] Additionally, in some embodiments, a Gam protein can be fused to an N terminus of a base editor. In some embodiments, a Gam protein can be fused to a C-terminus of a base editor. The Gam protein of bacteriophage Mu can bind to the ends of double strand breaks (DSBs) and protect them from degradation. In some embodiments, using Gam to bind the free ends of DSB can reduce indel formation during the process of base editing. In some embodiments, 174-residue Gam protein is fused to the N terminus of the base editors. See. Komor, A. C., et al., “Improved base excision repair inhibition and bacteriophage Mu Gam protein yields C:G-to-T:A base editors with higher efficiency and product purity” Science Advances 3:eaao4774 (2017).

[0485] In some embodiments, a mutation or mutations can change the length of a base editor domain relative to a wild type domain. For example, a deletion of at least one amino acid in at least one domain can reduce the length of the base editor. In another case, a mutation or mutations do not change the length of a domain relative to a wild type domain. For example, substitution(s) in any domain does/do not change the length of the base editor.

[0486] In some embodiments, a base editor can comprise as a domain all or a portion of a nucleic acid polymerase (NAP). For example, a base editor can comprise all or a portion of a eukaryotic NAP. In some embodiments, a NAP or portion thereof incorporated into a base editor is a DNA polymerase. In some embodiments, a NAP or portion thereof incorporated into a base editor has translesion polymerase activity. In some embodiments, a NAP or portion thereof incorporated into a base editor is a translesion DNA polymerase. In some embodiments, a NAP or portion thereof incorporated into a base editor is a Rev7, Revl complex, polymerase iota, polymerase kappa, or polymerase eta. In some embodiments, a NAP or portion thereof incorporated into a base editor is a eukaryotic polymerase alpha, beta, gamma, delta, epsilon, gamma, eta, iota, kappa, lambda, mu, or nu component. In some embodiments, a NAP or portion thereof incorporated into a base editor comprises an amino acid sequence that is at least 75%, 80%, 85%, 90%, 95%, 96%, 97%, 98%, 99%, or 99.5% identical to a nucleic acid polymerase (e.g., a translesion DNA polymerase).

### Base Editor System

[0487] Use of the base editor system provided herein comprises the steps of: (a) contacting a target nucleotide sequence of a polynucleotide (e.g., double- or single stranded DNA or RNA) of a subject with a base editor system comprising a nucleobase editor (e.g., an adenosine base editor) and a guide polynucleic acid (e.g., gRNA), wherein the target nucleotide sequence comprises a targeted nucleobase pair; (b) inducing strand separation of said target region; (c) converting a first nucleobase of said target nucleobase pair in a single strand of the target region to a second nucleobase; and (d) cutting no more than one strand of said target region, where a third nucleobase complementary to the first nucleobase base is replaced by a fourth nucleobase complementary to the second nucleobase. It should be appreciated that in some embodiments, step (b) is omitted. In some embodiments, said targeted nucleobase pair is a plurality of nucleobase pairs in one or more genes. In some embodiments, the base editor system provided herein is capable of multiplex editing of a plurality of nucleobase pairs in one or more genes. In some embodiments, the plurality of nucleobase pairs is located in the same gene. In some embodiments, the plurality of nucleobase pairs is located in one or more genes, wherein at least one gene is located in a different locus.

[0488] In some embodiments, the cut single strand (nicked strand) is hybridized to the guide nucleic acid. In some embodiments, the cut single strand is opposite to the strand comprising the first nucleobase. In some embodiments, the base editor comprises a Cas9 domain. In some embodiments, the first base is adenine, and the second base is not a G, C, A, or T. In some embodiments, the second base is inosine.

[0489] Base editing system as provided herein provides a new approach to genome editing that uses a fusion protein containing a catalytically defective Streptococcus pyogenes Cas9, an adenosine deaminase, and an inhibitor of base excision repair to induce programmable, single nucleotide (C→T or A→G) changes in DNA without generating double-strand DNA breaks, without requiring a donor DNA template, and without inducing an excess of stochastic insertions and deletions.

[0490] Provided herein are systems, compositions, and methods for editing a nucleobase using a base editor system. In some embodiments, the base editor system comprises (1) a base editor (BE) comprising a polynucleotide programmable nucleotide binding domain and a nucleobase editing domain (e.g., a deaminase domain) for editing the nucleobase; and (2) a guide polynucleotide (e.g., guide RNA) in conjunction with the polynucleotide programmable nucleotide binding domain. In some embodiments, the base editor system comprises an adenosine base editor (ABE). In some embodiments, the polynucleotide programmable nucleotide binding domain is a polynucleotide programmable DNA binding domain. In some embodiments, the polynucleotide programmable nucleotide binding domain is a polynucleotide programmable RNA binding domain. In some embodiments, the nucleobase editing domain is a deaminase domain. In some embodiments, a deaminase domain can be an adenine deaminase or an adenosine deaminase. In some embodiments, the adenosine base editor can deaminate adenine in DNA. In some embodiments, ABE comprises an evolved TadA variant.

[0491] Details of nucleobase editing proteins are described in International PCT Application Nos. PCT/2017/045381 (WO2018/027078) and PCT/US2016/058344 (WO2017/070632), each of which is incorporated herein by reference for its entirety. Also see Komor, A. C., et al., “Programmable editing of a target base in genomic DNA without double-stranded DNA cleavage” Nature 533, 420-424 (2016); Gaudelli, N. M., et al., “Programmable base editing of A•T to G•C in genomic DNA without DNA cleavage” Nature 551, 464-471 (2017); and Komor, A C., et al., “Improved base excision repair inhibition and bacteriophage Mu Gam protein yields C:G-to-T:A base editors with higher efficiency and product purity” Science Advances 3:eaao4774 (2017), the entire contents of which are hereby incorporated by reference.

[0492] In some embodiments, a single guide polynucleotide may be utilized to target a deaminase to a target nucleic acid sequence. In some embodiments, a single pair of guide polynucleotides may be utilized to target different deaminases to a target nucleic acid sequence.

[0493] The nucleobase components and the polynucleotide programmable nucleotide binding component of a base editor system may be associated with each other covalently or non-covalently. For example, in some embodiments, the deaminase domain can be targeted to a target nucleotide sequence by a polynucleotide programmable nucleotide binding domain. In some embodiments, a polynucleotide programmable nucleotide binding domain can be fused or linked to a deaminase domain. In some embodiments, a polynucleotide programmable nucleotide binding domain can target a deaminase domain to a target nucleotide sequence by non-covalently interacting with or associating with the deaminase domain. For example, in some embodiments, the nucleobase editing component, e.g., the deaminase component can comprise an additional heterologous portion or domain that is capable of interacting with, associating with, or capable of forming a complex with an additional heterologous portion or domain that is part of a polynucleotide programmable nucleotide binding domain. In some embodiments, the additional heterologous portion may be capable of binding to, interacting with, associating with, or forming a complex with a polypeptide. In some embodiments, the additional heterologous portion may be capable of binding to, interacting with, associating with, or forming a complex with a polynucleotide. In some embodiments, the additional heterologous portion may be capable of binding to a guide polynucleotide. In some embodiments, the additional heterologous portion may be capable of binding to a polypeptide linker. In some embodiments, the additional heterologous portion may be capable of binding to a polynucleotide linker. The additional heterologous portion may be a protein domain. In some embodiments, the additional heterologous portion may be a K Homology (KH) domain, a MS2 coat protein domain, a PP7 coat protein domain, a SfMu Com coat protein domain, a steril alpha motif, a telomerase Ku binding motif and Ku protein, a telomerase Sm7 binding motif and Sm7 protein, or an RNA recognition motif.

[0494] A base editor system may further comprise a guide polynucleotide component. It should be appreciated that components of the base editor system may be associated with each other via covalent bonds, noncovalent interactions, or any combination of associations and interactions thereof. In some embodiments, a deaminase domain can be targeted to a target nucleotide sequence by a guide polynucleotide. For example, in some embodiments, the nucleobase editing component of the base editor system, e.g., the deaminase component, can comprise an additional heterologous portion or domain (e.g., polynucleotide binding domain such as an RNA or DNA binding protein) that is capable of interacting with, associating with, or capable of forming a complex with a portion or segment (e.g., a polynucleotide motif) of a guide polynucleotide. In some embodiments, the additional heterologous portion or domain (e.g., polynucleotide binding domain such as an RNA or DNA binding protein) can be fused or linked to the deaminase domain. In some embodiments, the additional heterologous portion may be capable of binding to, interacting with, associating with, or forming a complex with a polypeptide. In some embodiments, the additional heterologous portion may be capable of binding to, interacting with, associating with, or forming a complex with a polynucleotide. In some embodiments, the additional heterologous portion may be capable of binding to a guide polynucleotide. In some embodiments, the additional heterologous portion may be capable of binding to a polypeptide linker. In some embodiments, the additional heterologous portion may be capable of binding to a polynucleotide linker. The additional heterologous portion may be a protein domain. In some embodiments, the additional heterologous portion may be a K Homology (KH) domain, a MS2 coat protein domain, a PP7 coat protein domain, a SfMu Com coat protein domain, a sterile alpha motif, a telomerase Ku binding motif and Ku protein, a telomerase Sm7 binding motif and Sm7 protein, or a RNA recognition motif.

[0495] In some embodiments, a base editor system can further comprise an inhibitor of base excision repair (BER) component. It should be appreciated that components of the base editor system may be associated with each other via covalent bonds, noncovalent interactions, or any combination of associations and interactions thereof. The inhibitor of BER component may comprise a base excision repair inhibitor. In some embodiments, the inhibitor of base excision repair can be a uracil DNA glycosylase inhibitor (UGI). In some embodiments, the inhibitor of base excision repair can be an inosine base excision repair inhibitor. In some embodiments, the inhibitor of base excision repair can be targeted to the target nucleotide sequence by the polynucleotide programmable nucleotide binding domain. In some embodiments, a polynucleotide programmable nucleotide binding domain can be fused or linked to an inhibitor of base excision repair. In some embodiments, a polynucleotide programmable nucleotide binding domain can be fused or linked to a deaminase domain and an inhibitor of base excision repair. In some embodiments, a polynucleotide programmable nucleotide binding domain can target an inhibitor of base excision repair to a target nucleotide sequence by non-covalently interacting with or associating with the inhibitor of base excision repair. For example, in some embodiments, the inhibitor of base excision repair component can comprise an additional heterologous portion or domain that is capable of interacting with, associating with, or capable of forming a complex with an additional heterologous portion or domain that is part of a polynucleotide programmable nucleotide binding domain. In some embodiments, the inhibitor of base excision repair can be targeted to the target nucleotide sequence by the guide polynucleotide. For example, in some embodiments, the inhibitor of base excision repair can comprise an additional heterologous portion or domain (e.g., polynucleotide binding domain such as an RNA or DNA binding protein) that is capable of interacting with, associating with, or capable of forming a complex with a portion or segment (e.g., a polynucleotide motif) of a guide polynucleotide. In some embodiments, the additional heterologous portion or domain of the guide polynucleotide (e.g., polynucleotide binding domain such as an RNA or DNA binding protein) can be fused or linked to the inhibitor of base excision repair. In some embodiments, the additional heterologous portion may be capable of binding to, interacting with, associating with, or forming a complex with a polynucleotide. In some embodiments, the additional heterologous portion may be capable of binding to a guide polynucleotide. In some embodiments, the additional heterologous portion may be capable of binding to a polypeptide linker. In some embodiments, the additional heterologous portion may be capable of binding to a polynucleotide linker. The additional heterologous portion may be a protein domain. In some embodiments, the additional heterologous portion may be a K Homology (KH) domain, a MS2 coat protein domain, a PP7 coat protein domain, a SfMu Com coat protein domain, a sterile alpha motif, a telomerase Ku binding motif and Ku protein, a telomerase Sm7 binding motif and Sm7 protein, or a RNA recognition motif.

[0496] In some embodiments, the base editor inhibits base excision repair (BER) of the edited strand. In some embodiments, the base editor protects or binds the non-edited strand. In some embodiments, the base editor comprises UGI activity. In some embodiments, the base editor comprises a catalytically inactive inosine-specific nuclease. In some embodiments, the base editor comprises nickase activity. In some embodiments, the intended edit of base pair is upstream of a PAM site. In some embodiments, the intended edit of base pair is 1, 2, 3, 4, 5, 6, 7, 8, 9, 10, 11, 12, 13, 14, 15, 16, 17, 18, 19, or 20 nucleotides upstream of the PAM site. In some embodiments, the intended edit of base-pair is downstream of a PAM site. In some embodiments, the intended edited base pair is 1, 2, 3, 4, 5, 6, 7, 8, 9, 10, 11, 12, 13, 14, 15, 16, 17, 18, 19, or 20 nucleotides downstream stream of the PAM site.

[0497] In some embodiments, the method does not require a canonical (e.g., NGG) PAM site. In some embodiments, the nucleobase editor comprises a linker or a spacer. In some embodiments, the linker or spacer is 1-25 amino acids in length. In some embodiments, the linker or spacer is 5-20 amino acids in length. In some embodiments, the linker or spacer is 10, 11, 12, 13, 14, 15, 16, 17, 18, 19, or 20 amino acids in length.

[0498] In some embodiments, the base editing fusion proteins provided herein need to be positioned at a precise location, for example, where a target base is placed within a defined region (e.g., a “deamination window”). In some embodiments, a target can be within a 4 base region. In some embodiments, such a defined target region can be approximately 15 bases upstream of the PAM. See Komor, A. C., et al., “Programmable editing of a target base in genomic DNA without double-stranded DNA cleavage” Nature 533, 420-424 (2016); Gaudelli, N. M., et al., “Programmable base editing of A•T to G•C in genomic DNA without DNA cleavage” Nature 551, 464-471 (2017); and Komor, A. C., et al., “Improved base excision repair inhibition and bacteriophage Mu Gam protein yields C:G-to-T:A base editors with higher efficiency and product purity” Science Advances 3:eaao4774 (2017), the entire contents of which are hereby incorporated by reference.

[0499] In some embodiments, the target region comprises a target window, wherein the target window comprises the target nucleobase pair. In some embodiments, the target window comprises 1-10 nucleotides. In some embodiments, the target window is 1, 2, 3, 4, 5, 6, 7, 8, 9, 10, 11, 12, 13, 14, 15, 16, 17, 18, 19, or 20 nucleotides in length. In some embodiments, the intended edit of base pair is within the target window. In some embodiments, the target window comprises the intended edit of base pair. In some embodiments, the method is performed using any of the base editors provided herein. In some embodiments, a target window is a deamination window. A deamination window can be the defined region in which a base editor acts upon and deaminates a target nucleotide. In some embodiments, the deamination window is within a 2, 3, 4, 5, 6, 7, 8, 9, or 10 base regions. In some embodiments, the deamination window is 5, 6, 7, 8, 9, 10, 11, 12, 13, 14, 15, 16, 17, 18, 19, 20, 21, 22, 23, 24, or 25 bases upstream of the PAM.

[0500] The base editors of the present disclosure can comprise any domain, feature or amino acid sequence which facilitates the editing of a target polynucleotide sequence. For example, in some embodiments, the base editor comprises a nuclear localization sequence (NLS). In some embodiments, an NLS of the base editor is localized between a deaminase domain and a polynucleotide programmable nucleotide binding domain. In some embodiments, an NLS of the base editor is localized C-terminal to a polynucleotide programmable nucleotide binding domain.

[0501] Other exemplary features that can be present in a base editor as disclosed herein are localization sequences, such as cytoplasmic localization sequences, export sequences, such as nuclear export sequences, or other localization sequences, as well as sequence tags that are useful for solubilization, purification, or detection of the fusion proteins. Suitable protein tags provided herein include, but are not limited to, biotin carboxylase carrier protein (BCCP) tags, myc-tags, calmodulin-tags, FLAG-tags, hemagglutinin (HA)-tags, polyhistidine tags, also referred to as histidine tags or His-tags, maltose binding protein (MBP)-tags, nus-tags, glutathione-S-transferase (GST)-tags, green fluorescent protein (GFP)-tags, thioredoxin-tags, S-tags, Softags (e.g., Softag 1, Softag 3), strep-tags, biotin ligase tags, FlAsH tags, V5 tags, and SBP-tags. Additional suitable sequences will be apparent to those of skill in the art. In some embodiments, the fusion protein comprises one or more His tags.

[0502] Non-limiting examples of protein domains which can be included in the fusion protein include deaminase domains (e.g., adenosine deaminase), a uracil glycosylase inhibitor (UGI) domain, epitope tags, and reporter gene sequences.

[0503] Non-limiting examples of epitope tags include histidine (His) tags, V5 tags, FLAG tags, influenza hemagglutinin (HA) tags, Myc tags, VSV-G tags, and thioredoxin (Trx) tags. Examples of reporter genes include, but are not limited to, glutathione-5-transferase (GST), horseradish peroxidase (HRP), chloramphenicol acetyltransferase (CAT) beta-galactosidase, beta-glucuronidase, luciferase, green fluorescent protein (GFP), HcRed, DsRed, cyan fluorescent protein (CFP), yellow fluorescent protein (YFP), and autofluorescent proteins including blue fluorescent protein (BFP). Additional protein sequences can include amino acid sequences that bind DNA molecules or bind other cellular molecules, including, but not limited to, maltose binding protein (MBP), S-tag, Lex A DNA binding domain (DBD) fusions, GAL4 DNA binding domain fusions, and herpes simplex virus (HSV) BP16 protein fusions.

[0504] In some embodiments, the adenosine base editor (ABE) can deaminate adenine in DNA. In some embodiments, ABE is generated by replacing APOBEC1 component of BE3 with natural or engineered E. coli TadA, human ADAR2, mouse ADA, or human ADAT2. In some embodiments, ABE comprises evolved TadA variant. In some embodiments, the ABE is ABE 1.2 (TadA*-XTEN-nCas9-NLS). In some embodiments, TadA* comprises A106V and D108N mutations.

[0505] In some embodiments, the ABE is a second-generation ABE. In some embodiments, the ABE is ABE2.1, which comprises additional mutations D147Y and E155V in TadA* (TadA*2.1). In some embodiments, the ABE is ABE2.2, ABE2.1 fused to catalytically inactivated version of human alkyl adenine DNA glycosylase (AAG with E125Q mutation). In some embodiments, the ABE is ABE2.3, ABE2.1 fused to catalytically inactivated version of E. coli Endo V (inactivated with D35A mutation). In some embodiments, the ABE is ABE2.6 which has a linker twice as long (32 amino acids, (SGGS)₂-XTEN-(SGGS)₂ (“(SGGS)₂” disclosed as SEQ ID NO: 104)) as the linker in ABE2.1. In some embodiments, the ABE is ABE2.7, which is ABE2.1 tethered with an additional wild-type TadA monomer. In some embodiments, the ABE is ABE2.8, which is ABE2.1 tethered with an additional TadA*2.1 monomer. In some embodiments, the ABE is ABE2.9, which is a direct fusion of evolved TadA (TadA*2.1) to the N-terminus of ABE2.1. In some embodiments, the ABE is ABE2.10, which is a direct fusion of wild type TadA to the N-terminus of ABE2.1. In some embodiments, the ABE is ABE2.11, which is ABE2.9 with an inactivating E59A mutation at the N-terminus of TadA* monomer. In some embodiments, the ABE is ABE2.12, which is ABE2.9 with an inactivating E59A mutation in the internal TadA* monomer.

[0506] In some embodiments, the ABE is a third generation ABE. In some embodiments, the ABE is ABE3.1, which is ABE2.3 with three additional TadA mutations (L84F, H123Y, and I156F).

[0507] In some embodiments, the ABE is a fourth generation ABE. In some embodiments, the ABE is ABE4.3, which is ABE3.1 with an additional TadA mutation A142N (TadA*4.3).

[0508] In some embodiments, the ABE is a fifth generation ABE. In some embodiments, the ABE is ABE5.1, which is generated by importing a consensus set of mutations from surviving clones (H36L, R51L, S146C, and K157N) into ABE3.1. In some embodiments, the ABE is ABE5.3, which has a heterodimeric construct containing wild-type E. coli TadA fused to an internal evolved TadA*. In some embodiments, the ABE is ABE5.2, ABE5.4, ABE5.5, ABE5.6, ABE5.7, ABE5.8, ABE5.9, ABE5.10, ABE5.11, ABE5.12, ABE5.13, or ABE5.14, as shown in below Table 6. In some embodiments, the ABE is a sixth generation ABE. In some embodiments, the ABE is ABE6.1, ABE6.2, ABE6.3, ABE6.4, ABE6.5, or ABE6.6, as shown in below Table 6. In some embodiments, the ABE is a seventh generation ABE. In some embodiments, the ABE is ABE7.1, ABE7.2, ABE7.3, ABE7.4, ABE7.5, ABE7.6, ABE7.7, ABE7.8, ABE 7.9, or ABE7.10, as shown in Table 6 below.

TABLE 6
Genotypes of ABEs

| | 23 | 26 | 36 | 37 | 48 | 49 | 51 | 72 | 84 | 87 | 105 | 108 | 123 | 125 | 142 | 145 | 147 | 152 | 155 | 156 | 157 | 161 |
|---|---|---|---|---|---|---|---|---|---|---|---|---|---|---|---|---|---|---|---|---|---|---|
| ABE0.1 | W | R | H | N | P | | R | N | L | S | A | D | H | G | A | S | D | R | E | I | K | K |
| ABE0.2 | W | R | H | N | P | | R | N | L | S | A | D | H | G | A | S | D | R | E | I | K | K |
| ABE1.1 | W | R | H | N | P | | R | N | L | S | A | N | H | G | A | S | D | R | E | I | K | K |
| ABE1.2 | W | R | H | N | P | | R | N | L | S | V | N | H | G | A | S | D | R | E | I | K | K |
| ABE2.1 | W | R | H | N | P | | R | N | L | S | V | N | H | G | A | S | Y | R | V | I | K | K |
| ABE2.2 | W | R | H | N | P | | R | N | L | S | V | N | H | G | A | S | Y | R | V | I | K | K |
| ABE2.3 | W | R | H | N | P | | R | N | L | S | V | N | H | G | A | S | Y | R | V | I | K | K |
| ABE2.4 | W | R | H | N | P | | R | N | L | S | V | N | H | G | A | S | Y | R | V | I | K | K |
| ABE2.5 | W | R | H | N | P | | R | N | L | S | V | N | H | G | A | S | Y | R | V | I | K | K |
| ABE2.6 | W | R | H | N | P | | R | N | L | S | V | N | H | G | A | S | Y | R | V | I | K | K |
| ABE2.7 | W | R | H | N | P | | R | N | L | S | V | N | H | G | A | S | Y | R | V | I | K | K |
| ABE2.8 | W | R | H | N | P | | R | N | L | S | V | N | H | G | A | S | Y | R | V | I | K | K |
| ABE2.9 | W | R | H | N | P | | R | N | L | S | V | N | H | G | A | S | Y | R | V | I | K | K |
| ABE2.10 | W | R | H | N | P | | R | N | L | S | V | N | H | G | A | S | Y | R | V | I | K | K |
| ABE2.11 | W | R | H | N | P | | R | N | L | S | V | N | H | G | A | S | Y | R | V | I | K | K |
| ABE2.12 | W | R | H | N | P | | R | N | L | S | V | N | H | G | A | S | Y | R | V | I | K | K |
| ABE3.1 | W | R | H | N | P | | R | N | F | S | V | N | Y | G | A | S | Y | R | V | F | K | K |
| ABE3.2 | W | R | H | N | P | | R | N | F | S | V | N | Y | G | A | S | Y | R | V | F | K | K |
| ABE3.3 | W | R | H | N | P | | R | N | F | S | V | N | Y | G | A | S | Y | R | V | F | K | K |
| ABE3.4 | W | R | H | N | P | | R | N | F | S | V | N | Y | G | A | S | Y | R | V | F | K | K |
| ABE3.5 | W | R | H | N | P | | R | N | F | S | V | N | Y | G | A | S | Y | R | V | F | K | K |
| ABE3.6 | W | R | H | N | P | | R | N | F | S | V | N | Y | G | A | S | Y | R | V | F | K | K |
| ABE3.7 | W | R | H | N | P | | R | N | F | S | V | N | Y | G | A | S | Y | R | V | F | K | K |
| ABE3.8 | W | R | H | N | P | | R | N | F | S | V | N | Y | G | A | S | Y | R | V | F | K | K |
| ABE4.1 | W | R | H | N | P | | R | N | L | S | V | N | H | G | N | S | Y | R | V | I | K | K |
| ABE4.2 | W | G | H | N | P | | R | N | L | S | V | N | H | G | N | S | Y | R | V | I | K | K |
| ABE4.3 | W | R | H | N | P | | R | N | F | S | V | N | Y | G | N | S | Y | R | V | F | K | K |
| ABE5.1 | W | R | L | N | P | | L | N | F | S | V | N | Y | G | A | C | Y | R | V | F | N | K |
| ABE5.2 | W | R | H | S | P | | R | N | F | S | V | N | Y | G | A | S | Y | R | V | F | K | T |
| ABE5.3 | W | R | L | N | P | | L | N | I | S | V | N | Y | G | A | C | Y | R | V | I | N | K |
| ABE5.4 | W | R | H | S | P | | R | N | F | S | V | N | Y | G | A | S | Y | R | V | F | K | T |
| ABE5.5 | W | R | L | N | P | | L | N | F | S | V | N | Y | G | A | C | Y | R | V | F | N | K |
| ABE5.6 | W | R | L | N | P | | L | N | F | S | V | N | Y | G | A | C | Y | R | V | F | N | K |
| ABE5.7 | W | R | L | N | P | | L | N | F | S | V | N | Y | G | A | C | Y | R | V | F | N | K |
| ABE5.8 | W | R | L | N | P | | L | N | F | S | V | N | Y | G | A | C | Y | R | V | F | N | K |
| ABE5.9 | W | R | L | N | P | | L | N | F | S | V | N | Y | G | A | C | Y | R | V | F | N | K |
| ABE5.10 | W | R | L | N | P | | L | N | F | S | V | N | Y | G | A | C | Y | R | V | F | N | K |
| ABE5.11 | W | R | L | N | P | | L | N | F | S | V | N | Y | G | A | C | Y | R | V | F | N | K |
| ABE5.12 | W | R | L | N | P | | L | N | F | S | V | N | Y | G | A | C | Y | R | V | F | N | K |
| ABE5.13 | W | R | H | N | P | | L | D | F | S | V | N | Y | A | A | S | Y | R | V | F | K | K |
| ABE5.14 | W | R | H | N | S | | L | N | F | C | V | N | Y | G | A | S | Y | R | V | F | K | K |
| ABE6.1 | W | R | H | N | S | | L | N | F | S | V | N | Y | G | N | S | Y | R | V | F | K | K |
| ABE6.2 | W | R | H | N | T | V | L | N | F | S | V | N | Y | G | N | S | Y | R | V | F | N | K |
| ABE6.3 | W | R | L | N | S | | L | N | F | S | V | N | Y | G | A | C | Y | R | V | F | N | K |
| ABE6.4 | W | R | L | N | S | | L | N | F | S | V | N | Y | G | N | C | Y | R | V | F | N | K |
| ABE6.5 | W | R | L | N | I | V | L | N | F | S | V | N | Y | G | A | C | Y | R | V | F | N | K |
| ABE6.6 | W | R | L | N | T | V | L | N | F | S | V | N | Y | G | N | C | Y | R | V | F | N | K |
| ABE7.1 | W | R | L | N | A | | L | N | F | S | V | N | Y | G | A | C | Y | R | V | F | N | K |
| ABE7.2 | W | R | L | N | A | | L | N | F | S | V | N | Y | G | N | C | Y | R | V | F | N | K |
| ABE7.3 | I | R | L | N | A | | L | N | F | S | V | N | Y | G | A | C | Y | R | V | F | N | K |
| ABE7.4 | R | R | L | N | A | | L | N | F | S | V | N | Y | G | A | C | Y | R | V | F | N | K |
| ABE7.5 | W | R | L | N | A | | L | N | F | S | V | N | Y | G | A | C | Y | H | V | F | N | K |
| ABE7.6 | W | R | L | N | A | | L | N | I | S | V | N | Y | G | A | C | Y | P | V | I | N | K |
| ABE7.7 | L | R | L | N | A | | L | N | F | S | V | N | Y | G | A | C | Y | P | V | F | N | K |
| ABE7.8 | I | R | L | N | A | | L | N | F | S | V | N | Y | G | N | C | Y | R | V | F | N | K |
| ABE7.9 | L | R | L | N | A | | L | N | F | S | V | N | Y | G | N | C | Y | P | V | F | N | K |
| ABE7.10 | R | R | L | N | A | | L | N | F | S | V | N | Y | G | A | C | Y | P | V | F | N | K |

[0509] In some embodiments, the base editor is an eighth generation ABE (ABE8). In some embodiments, the ABE8 contains a TadA*8 variant. In some embodiments, the ABE8 has a monomeric construct containing a TadA*8 variant (“ABE8.x-m”). In some embodiments, the ABE8 is ABE8.1-m, which has a monomeric construct containing TadA*7.10 with a Y147T mutation (TadA*8.1). In some embodiments, the ABE8 is ABE8.2-m, which has a monomeric construct containing TadA*7.10 with a Y147R mutation (TadA*8.2). In some embodiments, the ABE8 is ABE8.3-m, which has a monomeric construct containing TadA*7.10 with a Q154S mutation (TadA*8.3). In some embodiments, the ABE8 is ABE8.4-m, which has a monomeric construct containing TadA*7.10 with a Y123H mutation (TadA*8.4). In some embodiments, the ABE8 is ABE8.5-m, which has a monomeric construct containing TadA*7.10 with a V82S mutation (TadA*8.5). In some embodiments, the ABE8 is ABE8.6-m, which has a monomeric construct containing TadA*7.10 with a T166R mutation (TadA*8.6). In some embodiments, the ABE8 is ABE8.3-m, which has a monomeric construct containing TadA*7.10 with a Q154R mutation (TadA*8.7). In some embodiments, the ABE8 is ABE8.8-m, which has a monomeric construct containing TadA*7.10 with Y147R, Q154R, and Y123H mutations (TadA*8.8). In some embodiments, the ABE8 is ABE8.9-m, which has a monomeric construct containing TadA*7.10 with Y147R, Q154R and I76Y mutations (TadA*8.9). In some embodiments, the ABE8 is ABE8.10-m, which has a monomeric construct containing TadA*7.10 with Y147R, Q154R, and T166R mutations (TadA*8.10). In some embodiments, the ABE8 is ABE8.11-m, which has a monomeric construct containing TadA*7.10 with Y147T and Q154R mutations (TadA*8.11). In some embodiments, the ABE8 is ABE8.12-m, which has a monomeric construct containing TadA*7.10 with Y147T and Q154S mutations (TadA*8.12). In some embodiments, the ABE8 is ABE8.13-m, which has a monomeric construct containing TadA*7.10 with Y123H (Y123H reverted from H123Y), Y147R, Q154R and I76Y mutations (TadA*8.13). In some embodiments, the ABE8 is ABE8.14-m, which has a monomeric construct containing TadA*7.10 with I76Y and V82S mutations (TadA*8.14). In some embodiments, the ABE8 is ABE8.15-m, which has a monomeric construct containing TadA*7.10 with V82S and Y147R mutations (TadA*8.15). In some embodiments, the ABE8 is ABE8.16-m, which has a monomeric construct containing TadA*7.10 with V82S, Y123H (Y123H reverted from H123Y) and Y147R mutations (TadA*8.16). In some embodiments, the ABE8 is ABE8.17-m, which has a monomeric construct containing TadA*7.10 with V82S and Q154R mutations (TadA*8.17). In some embodiments, the ABE8 is ABE8.18-m, which has a monomeric construct containing TadA*7.10 with V82S, Y123H (Y123H reverted from H123Y) and Q154R mutations (TadA*8.18). In some embodiments, the ABE8 is ABE8.19-m, which has a monomeric construct containing TadA*7.10 with V82S, Y123H (Y123H reverted from H123Y), Y147R and Q154R mutations (TadA*8.19). In some embodiments, the ABE8 is ABE8.20-m, which has a monomeric construct containing TadA*7.10 with I76Y, V82S, Y123H (Y123H reverted from H123Y), Y147R and Q154R mutations (TadA*8.20). In some embodiments, the ABE8 is ABE8.21-m, which has a monomeric construct containing TadA*7.10 with Y147R and Q154S mutations (TadA*8.21). In some embodiments, the ABE8 is ABE8.22-m, which has a monomeric construct containing TadA*7.10 with V82S and Q154S mutations (TadA*8.22). In some embodiments, the ABE8 is ABE8.23-m, which has a monomeric construct containing TadA*7.10 with V82S and Y123H (Y123H reverted from H123Y) mutations (TadA*8.23). In some embodiments, the ABE8 is ABE8.24-m, which has a monomeric construct containing TadA*7.10 with V82S, Y123H (Y123H reverted from H123Y), and Y147T mutations (TadA*8.24).

[0510] In some embodiments, the ABE8 has a heterodimeric construct containing wild-type E. coli TadA fused to a TadA*8 variant (“ABE8.x-d”). In some embodiments, the ABE8 is ABE8.1-d, which has a heterodimeric construct containing wild-type E. coli TadA fused to TadA*7.10 with a Y147T mutation (TadA*8.1). In some embodiments, the ABE8 is ABE8.2-d, which has a heterodimeric construct containing wild-type E. coli TadA fused to TadA*7.10 with a Y147R mutation (TadA*8.2). In some embodiments, the ABE8 is ABE8.3-d, which has a heterodimeric construct containing wild-type E. coli TadA fused to TadA*7.10 with a Q154S mutation (TadA*8.3). In some embodiments, the ABE8 is ABE8.4-d, which has a heterodimeric construct containing wild-type E. coli TadA fused to TadA*7.10 with a Y123H mutation (TadA*8.4). In some embodiments, the ABE8 is ABE8.5-d, which has a heterodimeric construct containing wild-type E. coli TadA fused to TadA*7.10 with a V82S mutation (TadA*8.5). In some embodiments, the ABE8 is ABE8.6-d, which has a heterodimeric construct containing wild-type E. coli TadA fused to TadA*7.10 with a T166R mutation (TadA*8.6). In some embodiments, the ABE8 is ABE8.3-d, which has a heterodimeric construct containing wild-type E. coli TadA fused to TadA*7.10 with a Q154R mutation (TadA*8.7). In some embodiments, the ABE8 is ABE8.8-d, which has a heterodimeric construct containing wild-type E. coli TadA fused to TadA*7.10 with Y147R, Q154R, and Y123H mutations (TadA*8.8). In some embodiments, the ABE8 is ABE8.9-d, which has a heterodimeric construct containing wild-type E. coli TadA fused to TadA*7.10 with Y147R, Q154R and I76Y mutations (TadA*8.9). In some embodiments, the ABE8 is ABE8.10-d, which has a heterodimeric construct containing wild-type E. coli TadA fused to TadA*7.10 with Y147R, Q154R, and T166R mutations (TadA*8.10). In some embodiments, the ABE8 is ABE8.11-d, which has a heterodimeric construct containing wild-type E. coli TadA fused to TadA*7.10 with Y147T and Q154R mutations (TadA*8.11). In some embodiments, the ABE8 is ABE8.12-d, which has heterodimeric construct containing wild-type E. coli TadA fused to TadA*7.10 with Y147T and Q154S mutations (TadA*8.12). In some embodiments, the ABE8 is ABE8.13-d, which has a heterodimeric construct containing wild-type E. coli TadA fused to TadA*7.10 with Y123H (Y123H reverted from H123Y), Y147R, Q154R and I76Y mutations (TadA*8.13). In some embodiments, the ABE8 is ABE8.14-d, which has a heterodimeric construct containing wild-type E. coli TadA fused to TadA*7.10 with I76Y and V82S mutations (TadA*8.14). In some embodiments, the ABE8 is ABE8.15-d, which has a heterodimeric construct containing wild-type E. coli TadA fused to TadA*7.10 with V82S and Y147R mutations (TadA*8.15). In some embodiments, the ABE8 is ABE8.16-d, which has a heterodimeric construct containing wild-type E. coli TadA fused to TadA*7.10 with V82S, Y123H (Y123H reverted from H123Y) and Y147R mutations (TadA*8.16). In some embodiments, the ABE8 is ABE8.17-d, which has a heterodimeric construct containing wild-type E. coli TadA fused to TadA*7.10 with V82S and Q154R mutations (TadA*8.17). In some embodiments, the ABE8 is ABE8.18-d, which has a heterodimeric construct containing wild-type E. coli TadA fused to TadA*7.10 with V82S, Y123H (Y123H reverted from H123Y) and Q154R mutations (TadA*8.18). In some embodiments, the ABE8 is ABE8.19-d, which has a heterodimeric construct containing wild-type E. coli TadA fused to TadA*7.10 with V82S, Y123H (Y123H reverted from H123Y), Y147R and Q154R mutations (TadA*8.19). In some embodiments, the ABE8 is ABE8.20-d, which has a heterodimeric construct containing wild-type E. coli TadA fused to TadA*7.10 with I76Y, V82S, Y123H (Y123H reverted from H123Y), Y147R and Q154R mutations (TadA*8.20). In some embodiments, the ABE8 is ABE8.21-d, which has a heterodimeric construct containing wild-type E. coli TadA fused to TadA*7.10 with Y147R and Q154S mutations (TadA*8.21). In some embodiments, the ABE8 is ABE8.22-d, which has a heterodimeric construct containing wild-type E. coli TadA fused to TadA*7.10 with V82S and Q154S mutations (TadA*8.22). In some embodiments, the ABE8 is ABE8.23-d, which has a heterodimeric construct containing wild-type E. coli TadA fused to TadA*7.10 with V82S and Y123H (Y123H reverted from H123Y) mutations (TadA*8.23). In some embodiments, the ABE8 is ABE8.24-d, which has a heterodimeric construct containing wild-type E. coli TadA fused to TadA*7.10 with V82S, Y123H (Y123H reverted from H123Y), and Y147T mutations (TadA*8.24).

[0511] In some embodiments, the ABE8 has a heterodimeric construct containing TadA*7.10 fused to a TadA*8 variant (“ABE8.x-7”). In some embodiments, the ABE8 is ABE8.1-7, which has a heterodimeric construct containing TadA*7.10 fused to TadA*7.10 with a Y147T mutation (TadA*8.1). In some embodiments, the ABE8 is ABE8.2-7, which has a heterodimeric construct containing TadA*7.10 fused to TadA*7.10 with a Y147R mutation (TadA*8.2). In some embodiments, the ABE8 is ABE8.3-7, which has a heterodimeric construct containing TadA*7.10 fused to TadA*7.10 with a Q154S mutation (TadA*8.3). In some embodiments, the ABE8 is ABE8.4-7, which has a heterodimeric construct containing TadA*7.10 fused to TadA*7.10 with a Y123H mutation (TadA*8.4). In some embodiments, the ABE8 is ABE8.5-7, which has a heterodimeric construct containing TadA*7.10 fused to TadA*7.10 with a V82S mutation (TadA*8.5). In some embodiments, the ABE8 is ABE8.6-7, which has a heterodimeric construct containing TadA*7.10 fused to TadA*7.10 with a T166R mutation (TadA*8.6). In some embodiments, the ABE8 is ABE8.3-7, which has a heterodimeric construct containing TadA*7.10 fused to TadA*7.10 with a Q154R mutation (TadA*8.7). In some embodiments, the ABE8 is ABE8.8-7, which has a heterodimeric construct containing TadA*7.10 fused to TadA*7.10 with Y147R, Q154R, and Y123H mutations (TadA*8.8). In some embodiments, the ABE8 is ABE8.9-7, which has a heterodimeric construct containing TadA*7.10 fused to TadA*7.10 with Y147R, Q154R and I76Y mutations (TadA*8.9). In some embodiments, the ABE8 is ABE8.10-7, which has a heterodimeric construct containing TadA*7.10 fused to TadA*7.10 with Y147R, Q154R, and T166R mutations (TadA*8.10). In some embodiments, the ABE8 is ABE8.11-7, which has a heterodimeric construct containing TadA*7.10 fused to TadA*7.10 with Y147T and Q154R mutations (TadA*8.11). In some embodiments, the ABE8 is ABE8.12-7, which has a heterodimeric construct containing TadA*7.10 fused to TadA*7.10 with Y147T and Q154S mutations (TadA*8.12). In some embodiments, the ABE8 is ABE8.13-7, which has a heterodimeric construct containing TadA*7.10 fused to TadA*7.10 with Y123H (Y123H reverted from H123Y), Y147R, Q154R and I76Y mutations (TadA*8.13). In some embodiments, the ABE8 is ABE8.14-7, which has a heterodimeric construct containing TadA*7.10 fused to TadA*7.10 with I76Y and V82S mutations (TadA*8.14). In some embodiments, the ABE8 is ABE8.15-7, which has a heterodimeric construct containing TadA*7.10 fused to TadA*7.10 with V82S and Y147R mutations (TadA*8.15). In some embodiments, the ABE8 is ABE8.16-7, which has a heterodimeric construct containing TadA*7.10 fused to TadA*7.10 with V82S, Y123H (Y123H reverted from H123Y) and Y147R mutations (TadA*8.16). In some embodiments, the ABE8 is ABE8.17-7, which has a heterodimeric construct containing TadA*7.10 fused to TadA*7.10 with V82S and Q154R mutations (TadA*8.17). In some embodiments, the ABE8 is ABE8.18-7, which has a heterodimeric construct containing TadA*7.10 fused to TadA*7.10 with V82S, Y123H (Y123H reverted from H123Y) and Q154R mutations (TadA*8.18). In some embodiments, the ABE8 is ABE8.19-7, which has a heterodimeric construct containing TadA*7.10 fused to TadA*7.10 with V82S, Y123H (Y123H reverted from H123Y), Y147R and Q154R mutations (TadA*8.19). In some embodiments, the ABE8 is ABE8.20-7, which has a heterodimeric construct containing TadA*7.10 fused to TadA*7.10 with I76Y, V82S, Y123H (Y123H reverted from H123Y), Y147R and Q154R mutations (TadA*8.20). In some embodiments, the ABE8 is ABE8.21-7, which has a heterodimeric construct containing TadA*7.10 fused to TadA*7.10 with Y147R and Q154S mutations (TadA*8.21). In some embodiments, the ABE8 is ABE8.22-7, which has a heterodimeric construct containing TadA*7.10 fused to TadA*7.10 with V82S and Q154S mutations (TadA*8.22). In some embodiments, the ABE8 is ABE8.23-7, which has a heterodimeric construct containing TadA*7.10 fused to TadA*7.10 with V82S and Y123H (Y123H reverted from H123Y) mutations (TadA*8.23). In some embodiments, the ABE8 is ABE8.24-7, which has a heterodimeric construct containing TadA*7.10 fused to TadA*7.10 with V82S, Y123H (Y123H reverted from H123Y), and Y147T mutations (TadA*8.24

[0512] In some embodiments, the ABE is ABE8.1-m, ABE8.2-m, ABE8.3-m, ABE8.4-m, ABE8.5-m, ABE8.6-m, ABE8.7-m, ABE8.8-m, ABE8.9-m, ABE8.10-m, ABE8.11-m, ABE8.12-m, ABE8.13-m, ABE8.14-m, ABE8.15-m, ABE8.16-m, ABE8.17-m, ABE8.18-m, ABE8.19-m, ABE8.20-m, ABE8.21-m, ABE8.22-m, ABE8.23-m, ABE8.24-m, ABE8.1-d, ABE8.2-d, ABE8.3-d, ABE8.4-d, ABE8.5-d, ABE8.6-d, ABE8.7-d, ABE8.8-d, ABE8.9-d, ABE8.10-d, ABE8.11-d, ABE8.12-d, ABE8.13-d, ABE8.14-d, ABE8.15-d, ABE8.16-d, ABE8.17-d, ABE8.18-d, ABE8.19-d, ABE8.20-d, ABE8.21-d, ABE8.22-d, ABE8.23-d, or ABE8.24-d as shown in Table 7 below.

TABLE 7
Base Editors - ABE8s

| ABE8 | Adenosine | |
|---|---|---|
| Name | Deaminase | Adenosine Deaminase Description |
| ABE8.1-m | TadA*8.1 | Monomer_TadA*7.10 + Y147T |
| ABE8.2-m | TadA*8.2 | Monomer_TadA*7.10 + Y147R |
| ABE8.3-m | TadA*8.3 | Monomer_TadA*7.10 + Q154S |
| ABE8.4-m | TadA*8.4 | Monomer_TadA*7.10 + Y123H |
| ABE8.5-m | TadA*8.5 | Monomer_TadA*7.10 + V82S |
| ABE8.6-m | TadA*8.6 | Monomer_TadA*7.10 + T166R |
| ABE8.7-m | TadA*8.7 | Monomer_TadA*7.10 + Q154R |
| ABE8.8-m | TadA*8.8 | Monomer_TadA*7.10 + Y147R_Q154R_Y123H |
| ABE8.9-m | TadA*8.9 | Monomer_TadA*7.10 + Y147R_Q154R_I76Y |
| ABE8.10-m | TadA*8.10 | Monomer_TadA*7.10 + Y147R_Q154R_T166R |
| ABE8.11-m | TadA*8.11 | Monomer_TadA*7.10 + Y147T_Q154R |
| ABE8.12-m | TadA*8.12 | Monomer_TadA*7.10 + Y147T_Q154S |
| ABE8.13-m | TadA*8.13 | Monomer_TadA*7.10 + Y123H_Y147R_Q154R_I76Y |
| ABE8.14-m | TadA*8.14 | Monomer_TadA*7.10 + I76Y_V82S |
| ABE8.15-m | TadA*8.15 | Monomer_TadA*7.10 + V82S_Y147R |
| ABE8.16-m | TadA*8.16 | Monomer_TadA*7.10 + V82S_Y123H_Y147R |
| ABE8.17-m | TadA*8.17 | Monomer_TadA*7.10 + V82S_Q154R |
| ABE8.18-m | TadA*8.18 | Monomer_TadA*7.10 + V82S_Y123H_Q154R |
| ABE8.19-m | TadA*8.19 | Monomer_TadA*7.10 + V82S_Y123H_Y147R_Q154R |
| ABE8.20-m | TadA*8.20 | Monomer_TadA*7.10 + I76Y_V82S_Y123H_Y147R_Q154R |
| ABE8.21-m | TadA*8.21 | Monomer_TadA*7.10 + Y147R_Q154S |
| ABE8.22-m | TadA*8.22 | Monomer_TadA*7.10 + V82S_Q154S |
| ABE8.23-m | TadA*8.23 | Monomer_TadA*7.10 + V82S_Y123H |
| ABE8.24-m | TadA*8.24 | Monomer_TadA*7.10 + V82S_Y123H_Y147T |
| ABE8.1-d | TadA*8.1 | Heterodimer_(WT) + (TadA*7.10 + Y147T) |
| ABE8.2-d | TadA*8.2 | Heterodimer_(WT) + (TadA*7.10 + Y147R) |
| ABE8.3-d | TadA*8.3 | Heterodimer_(WT) + (TadA*7.10 + Q154S) |
| ABE8.4-d | TadA*8.4 | Heterodimer_(WT) + (TadA*7.10 + Y123H) |
| ABE8.5-d | TadA*8.5 | Heterodimer_(WT) + (TadA*7.10 + V82S) |
| ABE8.6-d | TadA*8.6 | Heterodimer_(WT) + (TadA*7.10 + T166R) |
| ABE8.7-d | TadA*8.7 | Heterodimer_(WT) + (TadA*7.10 + Q154R) |
| ABE8.8-d | TadA*8.8 | Heterodimer_(WT) + (TadA*7.10 + Y147R_Q154R_Y123H) |
| ABE8.9-d | TadA*8.9 | Heterodimer_(WT) + (TadA*7.10 + Y147R_Q154R_I76Y) |
| ABE8.10-d | TadA*8.10 | Heterodimer_(WT) + (TadA*7.10 + Y147R_Q154R_T166R) |
| ABE8.11-d | TadA*8.11 | Heterodimer_(WT) + (TadA*7.10 + Y147T_Q154R) |
| ABE8.12-d | TadA*8.12 | Heterodimer_(WT) + (TadA*7.10 + Y147T_Q154S) |
| ABE8.13-d | TadA*8.13 | Heterodimer_(WT) + (TadA*7.10 + Y123H_Y147T_Q154R_I76Y) |
| ABE8.14-d | TadA*8.14 | Heterodimer_(WT) + (TadA*7.10 + I76Y_V82S) |
| ABE8.15-d | TadA*8.15 | Heterodimer_(WT) + (TadA*7.10 + V82S_Y147R) |
| ABE8.16-d | TadA*8.16 | Heterodimer_(WT) + (TadA*7.10 + V82S_Y123H_Y147R) |
| ABE8.17-d | TadA*8.17 | Heterodimer_(WT) + (TadA*7.10 + V82S_Q154R) |
| ABE8.18-d | TadA*8.18 | Heterodimer_(WT) + (TadA*7.10 + V82S_Y123H_Q154R) |
| ABE8.19-d | TadA*8.19 | Heterodimer_(WT) + (TadA*7.10 + V82S_Y123H_Y147R_Q154R) |
| ABE8.20-d | TadA*8.20 | Heterodimer_(WT) + (TadA*7.10 + I76Y_V82S_Y123H_Y147R_Q154R) |
| ABE8.21-d | TadA*8.21 | Heterodimer_(WT) + (TadA*7.10 + Y147R_Q154S) |
| ABE8.22-d | TadA*8.22 | Heterodimer_(WT) + (TadA*7.10 + V82S_Q154S) |
| ABE8.23-d | TadA*8.23 | Heterodimer_(WT) + (TadA*7.10 + V82S_Y123H) |
| ABE8.24-d | TadA*8.24 | Heterodimer_(WT) + (TadA*7.10 + V82S_Y123H_Y147T) |

[0513] In some embodiments, base editors (e.g., ABE8) are generated by cloning an adenosine deaminase variant (e.g., TadA*8) into a scaffold that includes a circular permutant Cas9 (e.g., CP5 or CP6) and a bipartite nuclear localization sequence. In some embodiments, the base editor (e.g., ABE7.9, ABE7.10, or ABE8) is an NGC PAM CP5 variant (S. pyrogenes Cas9 or spVRQR Cas9). In some embodiments, the base editor (e.g., ABE7.9, ABE7.10, or ABE8) is an AGA PAM CP5 variant (S. pyrogenes Cas9 or spVRQR Cas9). In some embodiments, the base editor (e.g., ABE7.9, ABE7.10, or ABE8) is an NGC PAM CP6 variant (S. pyrogenes Cas9 or spVRQR Cas9). In some embodiments, the base editor (e.g. ABE7.9, ABE7.10, or ABE8) is an AGA PAM CP6 variant (S. pyrogenes Cas9 or spVRQR Cas9).

[0514] In some embodiments, the ABE has a genotype as shown in Table 8 below.

TABLE 8
Genotypes of ABEs

| | 23 | 26 | 36 | 37 | 48 | 49 | 51 | 72 | 84 | 87 | 105 | 108 | 123 | 125 | 142 | 145 | 147 | 152 | 155 | 156 | 157 | 161 |
|---|---|---|---|---|---|---|---|---|---|---|---|---|---|---|---|---|---|---|---|---|---|---|
| ABE7.9 | L | R | L | N | A | | L | N | F | S | V | N | Y | G | N | C | Y | P | V | F | N | K |
| ABE7.10 | R | R | L | N | A | | L | N | F | S | V | N | Y | G | A | C | Y | P | V | F | N | K |

[0515] As shown in Table 9 below, genotypes of 40 ABE8s are described. Residue positions in the evolved E. coli TadA portion of ABE are indicated. Mutational changes in ABE8 are shown when distinct from ABE7.10 mutations. In some embodiments, the ABE has a genotype of one of the ABEs presented in Table 9 below.

TABLE 9
Residue Identity in Evolved TadA

| | 23 | 36 | 48 | 51 | 76 | 82 | 84 | 106 | 108 | 123 | 146 | 147 | 152 | 154 | 155 | 156 | 157 | 166 |
|---|---|---|---|---|---|---|---|---|---|---|---|---|---|---|---|---|---|---|
| ABE7.10 | R | L | A | L | I | V | F | V | N | Y | C | Y | P | Q | V | F | N | T |
| ABE8.1-m | | | | | | | | | | | | T | | | | | | |
| ABE8.2-m | | | | | | | | | | | | R | | | | | | |
| ABE8.3-m | | | | | | | | | | | | | | S | | | | |
| ABE8.4-m | | | | | | | | | | H | | | | | | | | |
| ABE8.5-m | | | | | | S | | | | | | | | | | | | |
| ABE8.6-m | | | | | | | | | | | | | | | | | | R |
| ABE8.7-m | | | | | | | | | | | | | | R | | | | |
| ABE8.8-m | | | | | | | | | | H | | R | | R | | | | |
| ABE8.9-m | | | | | Y | | | | | | | R | | R | | | | |
| ABE8.10-m | | | | | | | | | | | | R | | R | | | | R |
| ABE8.11-m | | | | | | | | | | | | T | | R | | | | |
| ABE8.12-m | | | | | | | | | | | | T | | S | | | | |
| ABE8.13-m | | | | | Y | | | | | H | | R | | R | | | | |
| ABE8.14-m | | | | | Y | S | | | | | | | | | | | | |
| ABE8.15-m | | | | | | S | | | | | | R | | | | | | |
| ABE8.16-m | | | | | | S | | | | H | | R | | | | | | |
| ABE8.17-m | | | | | | S | | | | | | | | R | | | | |
| ABE8.18-m | | | | | | S | | | | H | | | | R | | | | |
| ABE8.19-m | | | | | | S | | | | H | | R | | R | | | | |
| ABE8.20-m | | | | | Y | S | | | | H | | R | | R | | | | |
| ABE8.21-m | | | | | | | | | | | | R | | S | | | | |
| ABE8.22-m | | | | | | S | | | | | | | | S | | | | |
| ABE8.23-m | | | | | | S | | | | H | | | | | | | | |
| ABE8.24-m | | | | | | S | | | | H | | T | | | | | | |
| ABE8.1-d | | | | | | | | | | | | T | | | | | | |
| ABE8.2-d | | | | | | | | | | | | R | | | | | | |
| ABE8.3-d | | | | | | | | | | | | | | S | | | | |
| ABE8.4-d | | | | | | | | | | H | | | | | | | | |
| ABE8.5-d | | | | | | S | | | | | | | | | | | | |
| ABE8.6-d | | | | | | | | | | | | | | | | | | R |
| ABE8.7-d | | | | | | | | | | | | | | R | | | | |
| ABE8.8-d | | | | | | | | | | H | | R | | R | | | | |
| ABE8.9-d | | | | | Y | | | | | | | R | | R | | | | |
| ABE8.10-d | | | | | | | | | | | | R | | R | | | | R |
| ABE8.11-d | | | | | | | | | | | | T | | R | | | | |
| ABE8.12-d | | | | | | | | | | | | T | | S | | | | |
| ABE8.13-d | | | | | Y | | | | | H | | R | | R | | | | |
| ABE8.14-d | | | | | Y | S | | | | | | | | | | | | |
| ABE8.15-d | | | | | | S | | | | | | R | | | | | | |
| ABE8.16-d | | | | | | S | | | | H | | R | | | | | | |
| ABE8.17-d | | | | | | S | | | | | | | | R | | | | |
| ABE8.18-d | | | | | | S | | | | H | | | | R | | | | |
| ABE8.19-d | | | | | | S | | | | H | | R | | R | | | | |
| ABE8.20-d | | | | | Y | S | | | | H | | R | | R | | | | |
| ABE8.21-d | | | | | | | | | | | | R | | S | | | | |
| ABE8.22-d | | | | | | S | | | | | | | | S | | | | |
| ABE8.23-d | | | | | | S | | | | H | | | | | | | | |
| ABE8.24-d | | | | | | S | | | | H | | T | | | | | | |

[0516] In some embodiments, the base editor is ABE8.1, which comprises or consists essentially of the following sequence or a fragment thereof having adenosine deaminase activity:

ABE8.1_Y147T_CP5_NGC PAM_monomer
(SEQ ID NO: 105)
MSEVEFSHEYWMRHALTLAKRARDEREVPVGAVLVLNNRVIGEGWNRAIG
LHDPTAHAEIMALRQGGLVMQNYRLIDATLYVTFEPCVMCAGAMIHSRIG
RVVFGVRNAKTGAAGSLMDVLHYPGMNHRVEITEGILADECAALLCTFFR
MPRQVFNAQKKAQSSTD [symbol] E
IGKATAKYFFYSNIMNFFKTEITLANGEIRKRPLIETNGETGEIVWDKGR
DFATVRKVLSMPQVNIVKKTEVQTGGFSKESILPKRNSDKLIARKKDWDP
KKYGGFMQPTVAYSVLVVAKVEKGKSKKLKSVKELLGITIMERSSFEKNP
IDFLEAKGYKEVKKDLIIKLPKYSLFELENGRKRMLASAKFLQKGNELAL
PSKYVNFLYLASHYEKLKGSPEDNEQKQLFVEQHKHYLDEIIEQISEFSK
RVILADANLDKVLSAYNKHRDKPIREQAENIIHLFTLTNLGAPRAFKYFD
TTIARKEYRSTKEVLDATLIHQSITGLYETRIDLSQLGGD [symbol] [symbol]
DKKYSIGLAIGTNSVGWAVITDEYKVPSK
KFKVLGNTDRHSIKKNLIGALLFDSGETAEATRLKRTARRRYTRRKNRIC
YLQEIFSNEMAKVDDSFFHRLEESFLVEEDKKHERHPIFGNIVDEVAYHE
KYPTIYHLRKKLVDSTDKADLRLIYLALAHMIKFRGHFLIEGDLNPDNSD
VDKLFIQLVQTYNQLFEENPINASGVDAKAILSARLSKSRRLENLIAQLP
GEKKNGLFGNLIALSLGLTPNFKSNFDLAEDAKLQLSKDTYDDDLDNLLA
QIGDQYADLFLAAKYLSDAILLSDILRVNTEITKAPLSASMIKRYDEHHQ
DLTLLKALVRQQLPEKYKEIFFDQSIMGYAGYIDGGASQEEFYKFIKPIL
EKMDGTEELLVKLNREDLLRKQRTFDNGSIPHQIHLGELHAILRRQEDFY
PFLKDNREKIEKILTFRIPYYVGPLARGNSRFAWMTRKSEETITPWNFEE
VVDKGASAQSFIERMTNFDIMLPNEKVLPKHSLLYEYFTVYNELTKVKYV
TEGMRKPAFLSGEQKKAIVDLLFKTNRKVTVKQLKEDYFKKIECFDSVEI
SGVEDRFNASLGTYHDLLKIIKDKDFLDNEENEDILEDIVLTLTLFEDRE
MIEERLKTYAHLFDDKVMKQLKRRRYTGWGRLSRKLINGIRDKQSGKTIL
DFLKSDGFANRNFMQLIHDDSLTFKEDIQKAQVSGQGDSLHEHIANLAGS
PAIKKGILQTVKVVDELVKVMGRHKPENIVIEMARENQTTQKGQKNSRER
MKRIEEGIKELGSQILKEHPVENTQLQNEKLYLYYLQNGRDMYVDQELDI
NRLSDYDVDHIVPQSFLKDDSIDNKVLTRSDKNRGKSDNVPSEEVVKKMK
NYWRQLLNAKLITQRKFDNLTKAERGGLSELDKAGFIKRQLVETRQITKH
VAQILDSRMNTKYDENDKLIREVKVITLKSKLVSDFRKDFQFYKVREINN
YHHAHDAYLNAVVGTALIKKYPKLESEFVYGDYKVYDVRKMIAKSEQEGA
DKRTADGSEFESPKKKRKV*

[0517] In the above sequence, the plain text denotes an adenosine deaminase sequence, bold sequence indicates sequence derived from Cas9, the italics sequence denotes a linker sequence, and the underlined sequence denotes a bipartite nuclear localization sequence.

[0518] In some embodiments, the base editor is ABE8.1, which comprises or consists essentially of the following sequence or a fragment thereof having adenosine deaminase activity:

pNMG-B335 ABE8.1_Y147T_CP5_NGC PAM_monomer
(SEQ ID NO: 105)
MSEVEFSHEYWMRHALTLAKRARDEREVPVGAVLVLNNRVIGEGWNRAIGL
HDPTAHAEIMALRQGGLVMQNYRLIDATLYVTFEPCVMCAGAMIHSRIGRV
VFGVRNAKTGAAGSLMDVLHYPGMNHRVEITEGILADECAALLCTFFRMPR
QVFNAQKKAQSSTDSGGSSGGSSGSETPGTSESATPESSGGSSGGSEIGKA
TAKYFFYSNIMNFFKTEITLANGEIRKRPLIETNGETGEIVWDKGRDFATV
RKVLSMPQVNIVKKTEVQTGGFSKESILPKRNSDKLIARKKDWDPKKYGGF
MQPTVAYSVLVVAKVEKGKSKKLKSVKELLGITIMERSSFEKNPIDFLEAK
GYKEVKKDLIIKLPKYSLFELENGRKRMLASAKFLQKGNELALPSKYVNFL
YLASHYEKLKGSPEDNEQKQLFVEQHKHYLDEIIEQISEFSKRVILADANL
DKVLSAYNKHRDKPIREQAENIIHLFTLTNLGAPRAFKYFDTTIARKEYRS
TKEVLDATLIHQSITGLYETRIDLSQLGGDGGSGGSGGSGGSGGSGGSGGM
DKKYSIGLAIGTNSVGWAVITDEYKVPSKKFKVLGNTDRHSIKKNLIGALL
FDSGETAEATRLKRTARRRYTRRKNRICYLQEIFSNEMAKVDDSFFHRLEE
SFLVEEDKKHERHPIFGNIVDEVAYHEKYPTIYHLRKKLVDSTDKADLRLI
YLALAHMIKFRGHFLIEGDLNPDNSDVDKLFIQLVQTYNQLFEENPINASG
VDAKAILSARLSKSRRLENLIAQLPGEKKNGLFGNLIALSLGLTPNFKSNF
DLAEDAKLQLSKDTYDDDLDNLLAQIGDQYADLFLAAKNLSDAILLSDILR
VNTEITKAPLSASMIKRYDEHHQDLTLLKALVRQQLPEKYKEIFFDQSKNG
YAGYIDGGASQEEFYKFIKPILEKMDGTEELLVKLNREDLLRKQRTFDNGS
IPHQIHLGELHAILRRQEDFYPFLKDNREKIEKILTFRIPYYVGPLARGNS
RFAWMTRKSEETITPWNFEEVVDKGASAQSFIERMTNFDKNLPNEKVLPKH
SLLYEYFTVYNELTKVKYVTEGMRKPAFLSGEQKKAIVDLLFKTNRKVTVK
QLKEDYFKKIECFDSVEISGVEDRFNASLGTYHDLLKIIKDKDFLDNEENE
DILEDIVLTLTLFEDREMIEERLKTYAHLFDDKVMKQLKRRRYTGWGRLSR
KLINGIRDKQSGKTILDFLKSDGFANRNFMQLIHDDSLTFKEDIQKAQVSG
QGDSLHEHIANLAGSPAIKKGILQTVKVVDELVKVMGRHKPENIVIEMARE
NQTTQKGQKNSRERMKRIEEGIKELGSQILKEHPVENTQLQNEKLYLYYLQ
NGRDMYVDQELDINRLSDYDVDHIVPQSFLKDDSIDNKVLTRSDKNRGKSD
NVPSEEVVKKMKNYWRQLLNAKLITQRKFDNLTKAERGGLSELDKAGFIKR
QLVETRQITKHVAQILDSRMNTKYDENDKLIREVKVITLKSKLVSDFRKDF
QFYKVREINNYHHAHDAYLNAVVGTALIKKYPKLESEFVYGDYKVYDVRKM
IAKSEQEGADKRTADGSEFESPKKKRKV*

[0519] In the above sequence, the plain text denotes an adenosine deaminase sequence, bold sequence indicates sequence derived from Cas9, the italics sequence denotes a linker sequence, and the underlined sequence denotes a bipartite nuclear localization sequence.

[0520] In some embodiments, the base editor is ABE8.14, which comprises or consists essentially of the following sequence or a fragment thereof having adenosine deaminase activity:

pNMG-357_ABE8.14 with NGC PAM CP5
(SEQ ID NO: 106)
MSEVEFSHEYWMRHALTLAKRAWDEREVPVGAVLVHNNRVIGEGWNRPIGR
HDPTAHAEIMALRQGGLVMQNYRLIDATLYVTLEPCVMCAGAMIHSRIGRV
VFGARDAKTGAAGSLMDVLHHPGMNHRVEITEGILADECAALLSDFFRMRR
QEIKAQKKAQSSTDGGSSGGSSGSETPGTSESATPESSGGSSGGSMSEVEF
SHEYWMRHALTLAKRARDEREVPVGAVLVLNNRVIGEGWNRAIGLHDPTAH
AEIMALRQGGLVMQNYRLIDATLYVTFEPCVMCAGAMIHSRIGRVVFGVRN
AKTGAAGSLMDVLHYPGMNHRVEITEGILADECAALLCTFFRMPRQVFNAQ
KKAQSSTDSGGSSGGSSGSETPGTSESATPESSGGSSGGSEIGKATAKYFF
YSNIMNFFKTEITLANGEIRKRPLIETNGETGEIVWDKGRDFATVRKVLSM
PQVNIVKKTEVQTGGFSKESILPKRNSDKLIARKKDWDPKKYGGFMQPTVA
YSVLVVAKVEKGKSKKLKSVKELLGITIMERSSFEKNPIDFLEAKGYKEVK
KDLIIKLPKYSLFELENGRKRMLASAKFLQKGNELALPSKYVNFLYLASHY
EKLKGSPEDNEQKQLFVEQHKHYLDEIIEQISEFSKRVILADANLDKVLSA
YNKHRDKPIREQAENIIHLFTLTNLGAPRAFKYFDTTIARKEYRSTKEVLD
ATLIHQSITGLYETRIDLSQLGGDGGSGGSGGSGGSGGSGGSGGMDKKYSI
GLAIGTNSVGWAVITDEYKVPSKKFKVLGNTDRHSIKKNLIGALLFDSGET
AEATRLKRTARRRYTRRKNRICYLQEIFSNEMAKVDDSFFHRLEESFLVEE
DKKHERHPIFGNIVDEVAYHEKYPTIYHLRKKLVDSTDKADLRLIYLALAH
MIKFRGHFLIEGDLNPDNSDVDKLFIQLVQTYNQLFEENPINASGVDAKAI
LSARLSKSRRLENLIAQLPGEKKNGLFGNLIALSLGLTPNFKSNFDLAEDA
KLQLSKDTYDDDLDNLLAQIGDQYADLFLAAKNLSDAILLSDILRVNTEIT
KAPLSASMIKRYDEHHQDLTLLKALVRQQLPEKYKEIFFDQSKNGYAGYID
GGASQEEFYKFIKPILEKMDGTEELLVKLNREDLLRKQRTFDNGSIPHQIH
LGELHAILRRQEDFYPFLKDNREKIEKILTFRIPYYVGPLARGNSRFAWMT
RKSEETITPWNFEEVVDKGASAQSFIERMTNFDKNLPNEKVLPKHSLLYEY
FTVYNELTKVKYVTEGMRKPAFLSGEQKKAIVDLLFKTNRKVTVKQLKEDY
FKKIECFDSVEISGVEDRFNASLGTYHDLLKIIKDKDFLDNEENEDILEDI
VLTLTLFEDREMIEERLKTYAHLFDDKVMKQLKRRRYTGWGRLSRKLINGI
RDKQSGKTILDFLKSDGFANRNFMQLIHDDSLTFKEDIQKAQVSGQGDSLH
EHIANLAGSPAIKKGILQTVKVVDELVKVMGRHKPENIVIEMARENQTTQK
GQKNSRERMKRIEEGIKELGSQILKEHPVENTQLQNEKLYLYYLQNGRDMY
VDQELDINRLSDYDVDHIVPQSFLKDDSIDNKVLTRSDKNRGKSDNVPSEE
VVKKMKNYWRQLLNAKLITQRKFDNLTKAERGGLSELDKAGFIKRQLVETR
QITKHVAQILDSRMNTKYDENDKLIREVKVITLKSKLVSDFRKDFQFYKVR
EINNYHHAHDAYLNAVVGTALIKKYPKLESEFVYGDYKVYDVRKMIAKSEQ
EGADKRTADGSEFESPKKKRKV*

[0521] In the above sequence, the plain text denotes an adenosine deaminase sequence, bold sequence indicates sequence derived from Cas9, the italics sequence denotes a linker sequence, and the underlined sequence denotes a bipartite nuclear localization sequence.

[0522] In some embodiments, the base editor is ABE8.8-m, which comprises or consists essentially of the following sequence or a fragment thereof having adenosine deaminase activity:

ABE8.8-m
(SEQ ID NO: 107)
MSEVEFSHEYWMRHALTLAKRARDEREVPVGAVLVLNNRVIGEGWNRAIGL
HDPTAHAEIMALRQGGLVMQNYRLIDATLYVTFEPCVMCAGAMIHSRIGRV
VFGVRNAKTGAAGSLMDVLHHPGMNHRVEITEGILADECAALLCRFFRMPR
RVFNAQKKAQSSTDSGGSSGGSSGSETPGTSESATPESSGGSSGGSDKKYS
IGLAIGTNSVGWAVITDEYKVPSKKFKVLGNTDRHSIKKNLIGALLFDSGE
TAEATRLKRTARRRYTRRKNRICYLQEIFSNEMAKVDDSFFHRLEESFLVE
EDKKHERHPIFGNIVDEVAYHEKYPTIYHLRKKLVDSTDKADLRLIYLALA
HMIKFRGHFLIEGDLNPDNSDVDKLFIQLVQTYNQLFEENPINASGVDAKA
ILSARLSKSRRLENLIAQLPGEKKNGLFGNLIALSLGLTPNFKSNFDLAED
AKLQLSKDTYDDDLDNLLAQIGDQYADLFLAAKNLSDAILLSDILRVNTEI
TKAPLSASMIKRYDEHHQDLTLLKALVRQQLPEKYKEIFFDQSKNGYAGYI
DGGASQEEFYKFIKPILEKMDGTEELLVKLNREDLLRKQRTFDNGSIPHQI
HLGELHAILRRQEDFYPFLKDNREKIEKILTFRIPYYVGPLARGNSRFAWM
TRKSEETITPWNFEEVVDKGASAQSFIERMTNFDKNLPNEKVLPKHSLLYE
YFTVYNELTKVKYVTEGMRKPAFLSGEQKKAIVDLLFKTNRKVTVKQLKED
YFKKIECFDSVEISGVEDRFNASLGTYHDLLKIIKDKDFLDNEENEDILED
IVLTLTLFEDREMIEERLKTYAHLFDDKVMKQLKRRRYTGWGRLSRKLING
IRDKQSGKTILDFLKSDGFANRNFMQLIHDDSLTFKEDIQKAQVSGQGDSL
HEHIANLAGSPAIKKGILQTVKVVDELVKVMGRHKPENIVIEMARENQTTQ
KGQKNSRERMKRIEEGIKELGSQILKEHPVENTQLQNEKLYLYYLQNGRDM
YVDQELDINRLSDYDVDHIVPQSFLKDDSIDNKVLTRSDKNRGKSDNVPSE
EVVKKMKNYWRQLLNAKLITQRKFDNLTKAERGGLSELDKAGFIKRQLVET
RQITKHVAQILDSRMNTKYDENDKLIREVKVITLKSKLVSDFRKDFQFYKV
REINNYHHAHDAYLNAVVGTALIKKYPKLESEFVYGDYKVYDVRKMIAKSE
QEIGKATAKYFFYSNIMNFFKTEITLANGEIRKRPLIETNGETGEIVWDKG
RDFATVRKVLSMPQVNIVKKTEVQTGGFSKESILPKRNSDKLIARKKDWDP
KKYGGFDSPTVAYSVLVVAKVEKGKSKKLKSVKELLGITIMERSSFEKNPI
DFLEAKGYKEVKKDLIIKLPKYSLFELENGRKRMLASAGELQKGNELALPS
KYVNFLYLASHYEKLKGSPEDNEQKQLFVEQHKHYLDEIIEQISEFSKRVI
LADANLDKVLSAYNKHRDKPIREQAENIIHLFTLTNLGAPAAFKYFDTTID
RKRYTSTKEVLDATLIHQSITGLYETRIDLSQLGGDEGADKRTADGSEFES
PKKKRKV*

[0523] In the above sequence, the plain text denotes an adenosine deaminase sequence, bold sequence indicates sequence derived from Cas9, the italicized sequence denotes a linker sequence, underlined sequence denotes a bipartite nuclear localization sequence, and double underlined sequence indicates mutations.

[0524] In some embodiments, the base editor is ABE8.8-d, which comprises or consists essentially of the following sequence or a fragment thereof having adenosine deaminase activity:

ABE8.8-d
(SEQ ID NO: 108)
MSEVEFSHEYWMRHALTLAKRAWDEREVPVGAVLVHNNRVIGEGWNRPIGR
HDPTAHAEIMALRQGGLVMQNYRLIDATLYVTLEPCVMCAGAMIHSRIGRV
VFGARDAKTGAAGSLMDVLHHPGMNHRVEITEGILADECAALLSDFFRMRR
QEIKAQKKAQSSTDSGGSSGGSSGSETPGTSESATPESSGGSSGGSSEVEF
SHEYWMRHALTLAKRARDEREVPVGAVLVLNNRVIGEGWNRAIGLHDPTAH
AEIMALRQGGLVMQNYRLIDATLYVTFEPCVMCAGAMIHSRIGRVVFGVRN
AKTGAAGSLMDVLHHPGMNHRVEITEGILADECAALLCRFFRMPRRVFNAQ
KKAQSSTDSGGSSGGSSGSETPGTSESATPESSGGSSGGSDKKYSIGLAIG
TNSVGWAVITDEYKVPSKKFKVLGNTDRHSIKKNLIGALLFDSGETAEATR
LKRTARRRYTRRKNRICYLQEIFSNEMAKVDDSFFHRLEESFLVEEDKKHE
RHPIFGNIVDEVAYHEKYPTIYHLRKKLVDSTDKADLRLIYLALAHMIKFR
GHFLIEGDLNPDNSDVDKLFIQLVQTYNQLFEENPINASGVDAKAILSARL
SKSRRLENLIAQLPGEKKNGLFGNLIALSLGLTPNFKSNFDLAEDAKLQLS
KDTYDDDLDNLLAQIGDQYADLFLAAKNLSDAILLSDILRVNTEITKAPLS
ASMIKRYDEHHQDLTLLKALVRQQLPEKYKEIFFDQSKNGYAGYIDGGASQ
EEFYKFIKPILEKMDGTEELLVKLNREDLLRKQRTFDNGSIPHQIHLGELH
AILRRQEDFYPFLKDNREKIEKILTFRIPYYVGPLARGNSRFAWMTRKSEE
TITPWNFEEVVDKGASAQSFIERMTNFDKNLPNEKVLPKHSLLYEYFTVYN
ELTKVKYVTEGMRKPAFLSGEQKKAIVDLLFKTNRKVTVKQLKEDYFKKIE
CFDSVEISGVEDRFNASLGTYHDLLKIIKDKDFLDNEENEDILEDIVLTLT
LFEDREMIEERLKTYAHLFDDKVMKQLKRRRYTGWGRLSRKLINGIRDKQS
GKTILDFLKSDGFANRNFMQLIHDDSLTFKEDIQKAQVSGQGDSLHEHIAN
LAGSPAIKKGILQTVKVVDELVKVMGRHKPENIVIEMARENQTTQKGQKNS
RERMKRIEEGIKELGSQILKEHPVENTQLQNEKLYLYYLQNGRDMYVDQEL
DINRLSDYDVDHIVPQSFLKDDSIDNKVLTRSDKNRGKSDNVPSEEVVKKM
KNYWRQLLNAKLITQRKFDNLTKAERGGLSELDKAGFIKRQLVETRQITKH
VAQILDSRMNTKYDENDKLIREVKVITLKSKLVSDFRKDFQFYKVREINNY
HHAHDAYLNAVVGTALIKKYPKLESEFVYGDYKVYDVRKMIAKSEQEIGKA
TAKYFFYSNIMNFFKTEITLANGEIRKRPLIETNGETGEIVWDKGRDFATV
RKVLSMPQVNIVKKTEVQTGGFSKESILPKRNSDKLIARKKDWDPKKYGGF
DSPTVAYSVLVVAKVEKGKSKKLKSVKELLGITIMERSSFEKNPIDFLEAK
GYKEVKKDLIIKLPKYSLFELENGRKRMLASAGELQKGNELALPSKYVNFL
YLASHYEKLKGSPEDNEQKQLFVEQHKHYLDEIIEQISEFSKRVILADANL
DKVLSAYNKHRDKPIREQAENIIHLFTLTNLGAPAAFKYFDTTIDRKRYTS
TKEVLDATLIHQSITGLYETRIDLSQLGGDEGADKRTADGSEFESPKKKRK
V*

[0525] In the above sequence, the plain text denotes an adenosine deaminase sequence, bold sequence indicates sequence derived from Cas9, the italicized sequence denotes a linker sequence, underlined sequence denotes a bipartite nuclear localization sequence, and double underlined sequence indicates mutations.

[0526] In some embodiments, the base editor is ABE8.13-m, which comprises or consists essentially of the following sequence or a fragment thereof having adenosine deaminase activity:

ABE8.13-m
(SEQ ID NO: 109)
MSEVEFSHEYWMRHALTLAKRARDEREVPVGAVLVLNNRVIGEGWNRAIGL
HDPTAHAEIMALRQGGLVMQNYRLYDATLYVTFEPCVMCAGAMIHSRIGRV
VFGVRNAKTGAAGSLMDVLHHPGMNHRVEITEGILADECAALLCRFFRMPR
RVFNAQKKAQSSTDSGGSSGGSSGSETPGTSESATPESSGGSSGGSDKKYS
IGLAIGTNSVGWAVITDEYKVPSKKFEWLGNTDRHSIKKNLIGALLFDSGE
TAEATRLKRTARRRYTRRKNRICYLQEIFSNEMAKVDDSFFHRLEESFLVE
EDKKHERHPIFGNIVDEVAYHEKYPTIYHLRKKLVDSTDKADLRLIYLALA
HMIKFRGHFLIEGDLNPDNSDVDKLFIQLVQTYNQLFEENPINASGVDAKA
ILSARLSKSRRLENLIAQLPGEKKNGLFGNLIALSLGLTPNFKSNFDLAED
AKLQLSKDTYDDDLDNLLAQIGDQYADLFLAAKNLSDAILLSDILRVNTEI
TKAPLSASMIKRYDEHHQDLTLLKALVRQQLPEKYKEIFFDQSKNGYAGYI
DGGASQEEFYKFIKPILEKMDGTEELLVKLNREDLLRKQRTFDNGSIPHQI
HLGELHAILRRQEDFYPFLKDNREKIEKILTFRIPYYVGPLARGNSRFAWM
TRKSEETITPWNFEEVVDKGASAQSFIERMTNFDKNLPNEKVLPKHSLLYE
YFTVYNELTKVKYVTEGMRKPAFLSGEQKKAIVDLLFKTNRKVTVKQLKED
YFKKIECFDSVEISGVEDRFNASLGTYHDLLKIIKDKDFLDNEENEDILED
IVLTLTLFEDREMIEERLKTYAHLFDDKVMKQLKRRRYTGWGRLSRKLING
IRDKQSGKTILDFLKSDGFANRNFMQLIHDDSLTFKEDIQKAQVSGQGDSL
HEHIANLAGSPAIKKGILQTVKVVDELVKVMGRHKPENIVIEMARENQTTQ
KGQKNSRERMKRIEEGIKELGSQILKEHPVENTQLQNEKLYLYYLQNGRDM
YVDQELDINRLSDYDVDHIVPQSFLKDDSIDNKVLTRSDKNRGKSDNVPSE
EVVKKMKNYWRQLLNAKLITQRKFDNLTKAERGGLSELDKAGFIKRQLVET
RQITKHVAQILDSRMNTKYDENDKLIREVKVITLKSKLVSDFRKDFQFYKV
REINNYHHAHDAYLNAVVGTALIKKYPKLESEFVYGDYKVYDVRKMIAKSE
QEIGKATAKYFFYSNIMNFFKTEITLANGEIRKRPLIETNGETGEIVWDKG
RDFATVRKVLSMPQVNIVKKTEVQTGGFSKESILPKRNSDKLIARKKDWDP
KKYGGFDSPTVAYSVLVVAKVEKGKSKKLKSVKELLGITIMERSSFEKNPI
DFLEAKGYKEVKKDLIIKLPKYSLFELENGRKRMLASAGELQKGNELALPS
KYVNFLYLASHYEKLKGSPEDNEQKQLFVEQHKHYLDEIIEQISEFSKRVI
LADANLDKVLSAYNKHRDKPIREQAENIIHLFTLTNLGAPAAFKYFDTTID
RKRYTSTKEVLDATLIHQSITGLYETRIDLSQLGGDEGADKRTADGSEFES
PKKKRKV*

[0527] In the above sequence, the plain text denotes an adenosine deaminase sequence, bold sequence indicates sequence derived from Cas9, the italicized sequence denotes a linker sequence, underlined sequence denotes a bipartite nuclear localization sequence, and double underlined sequence indicates mutations.

[0528] In some embodiments, the base editor is ABE8.13-d, which comprises or consists essentially of the following sequence or a fragment thereof having adenosine deaminase activity:

ABE8.13-d
(SEQ ID NO: 110)
MSEVEFSHEYWMRHALTLAKRAWDEREVPVGAVLVHNNRVIGEGWNRPIGRHDPTAHAEIMALRQGGLVM
QNYRLIDATLYVTLEPCVMCAGAMIHSRIGRVVFGARDAKTGAAGSLMDVLHHPGMNHRVEITEGILADE
CAALLSDFFRMRRQEIKAQKKAQSSTDSGGSSGGSSGSETPGTSESATPESSGGSSGGSSEVEFSHEYWM
RHALTLAKRARDEREVPVGAVLVLNNRVIGEGWNRAIGLHDPTAHAEIMALRQGGLVMQNYRLYDATLYV
TFEPCVMCAGAMIHSRIGRVVFGVRNAKTGAAGSLMDVLHHPGMNHRVEITEGILADECAALLCRFFRMP
RRVFNAQKKAQSSTDSGGSSGGSSGSETPGTSESATPESSGGSSGGSDKKYSIGLAIGTNSVGWAVITDE
YKVPSKKFKVLGNTDRHSIKKNLIGALLFDSGETAEATRLKRTARRRYTRRKNRICYLQEIFSNEMAKVD
DSFFHRLEESFLVEEDKKHERHPIFGNIVDEVAYHEKYPTIYHLRKKLVDSTDKADLRLIYLALAHMIKF
RGHFLIEGDLNPDNSDVDKLFIQLVQTYNQLFEENPINASGVDAKAILSARLSKSRRLENLIAQLPGEKK
NGLFGNLIALSLGLTPNFKSNFDLAEDAKLQLSKDTYDDDLDNLLAQIGDQYADLFLAAKNLSDAILLSD
ILRVNTEITKAPLSASMIKRYDEHHQDLTLLKALVRQQLPEKYKEIFFDQSKNGYAGYIDGGASQEEFYK
FIKPILEKMDGTEELLVKLNREDLLRKQRTFDNGSIPHQIHLGELHAILRRQEDFYPFLKDNREKIEKIL
TFRIPYYVGPLARGNSRFAWMTRKSEETITPWNFEEVVDKGASAQSFIERMTNFDKNLPNEKVLPKHSLL
YEYFTVYNELTKVKYVTEGMRKPAFLSGEQKKAIVDLLFKTNRKVTVKQLKEDYFKKIECFDSVEISGVE
DRFNASLGTYHDLLKIIKDKDFLDNEENEDILEDIVLTLTLFEDREMIEERLKTYAHLFDDKVMKQLKRR
RYTGWGRLSRKLINGIRDKQSGKTILDFLKSDGFANRNFMQLIHDDSLTFKEDIQKAQVSGQGDSLHEHI
ANLAGSPAIKKGILQTVKVVDELVKVMGRHKPENIVIEMARENQTTQKGQKNSRERMKRIEEGIKELGSQ
ILKEHPVENTQLQNEKLYLYYLQNGRDMYVDQELDINRLSDYDVDHIVPQSFLKDDSIDNKVLTRSDKNR
GKSDNVPSEEVVKKMKNYWRQLLNAKLITQRKFDNLTKAERGGLSELDKAGFIKRQLVETRQITKHVAQI
LDSRMNTKYDENDKLIREVKVITLKSKLVSDFRKDFQFYKVREINNYHHAHDAYLNAVVGTALIKKYPKL
ESEFVYGDYKVYDVRKMIAKSEQEIGKATAKYFFYSNIMNFFKTEITLANGEIRKRPLIETNGETGEIVW
DKGRDFATVRKVLSMPQVNIVKKTEVQTGGFSKESILPKRNSDKLIARKKDWDPKKYGGFDSPTVAYSVL
VVAKVEKGKSKKLKSVKELLGITIMERSSFEKNPIDFLEAKGYKEVKKDLIIKLPKYSLFELENGRKRML
ASAGELQKGNELALPSKYVNFLYLASHYEKLKGSPEDNEQKQLFVEQHKHYLDEIIEQISEFSKRVILAD
ANLDKVLSAYNKHRDKPIREQAENIIHLFTLTNLGAPAAFKYFDTTIDRKRYTSTKEVLDATLIHQSITG
LYETRIDLSQLGGDEGADKRTADGSEFESPKKKRKV*

[0529] In the above sequence, the plain text denotes an adenosine deaminase sequence, bold sequence indicates sequence derived from Cas9, the italicized sequence denotes a linker sequence, underlined sequence denotes a bipartite nuclear localization sequence, and double underlined sequence indicates mutations.

[0530] In some embodiments, the base editor is ABE8.17-m, which comprises or consists essentially of the following sequence or a fragment thereof having adenosine deaminase activity:

ABE8.17-m
(SEQ ID NO: 111)
MSEVEFSHEYWMRHALTLAKRARDEREVPVGAVLVLNNRVIGEGWNRAIGL
HDPTAHAEIMALRQGGLVMQNYRLIDATLYSTFEPCVMCAGAMIHSRIGRV
VFGVRNAKTGAAGSLMDVLHYPGMNHRVEITEGILADECAALLCYFFRMPR
RVFNAQKKAQSSTDSGGSSGGSSGSETPGTSESATPESSGGSSGGSDKKYS
IGLAIGTNSVGWAVITDEYKVPSKKFKVLGNTDRHSIKKNLIGALLFDSGE
TAEATRLKRTARRRYTRRKNRICYLQEIFSNEMAKVDDSFFHRLEESFLVE
EDKKHERHPIFGNIVDEVAYHEKYPTIYHLRKKLVDSTDKADLRLIYLALA
HMIKFRGHFLIEGDLNPDNSDVDKLFIQLVQTYNQLFEENPINASGVDAKA
ILSARLSKSRRLENLIAQLPGEKKNGLFGNLIALSLGLTPNFKSNFDLAED
AKLQLSKDTYDDDLDNLLAQIGDQYADLFLAAKNLSDAILLSDILRVNTEI
TKAPLSASMIKRYDEHHQDLTLLKALVRQQLPEKYKEIFFDQSKNGYAGYI
DGGASQEEFYKFIKPILEKMDGTEELLVKLNREDLLRKQRTFDNGSIPHQI
HLGELHAILRRQEDFYPFLKDNREKIEKILTFRIPYYVGPLARGNSRFAWM
TRKSEETITPWNFEEVVDKGASAQSFIERMTNFDKNLPNEKVLPKHSLLYE
YFTVYNELTKVKYVTEGMRKPAFLSGEQKKAIVDLLFKTNRKVTVKQLKED
YFKKIECFDSVEISGVEDRFNASLGTYHDLLKIIKDKDFLDNEENEDILED
IVLTLTLFEDREMIEERLKTYAHLFDDKVMKQLKRRRYTGWGRLSRKLING
IRDKQSGKTILDFLKSDGFANRNFMQLIHDDSLTFKEDIQKAQVSGQGDSL
HEHIANLAGSPAIKKGILQTVKVVDELVKVMGRHKPENIVIEMARENQTTQ
KGQKNSRERMKRIEEGIKELGSQILKEHPVENTQLQNEKLYLYYLQNGRDM
YVDQELDINRLSDYDVDHIVPQSFLKDDSIDNKVLTRSDKNRGKSDNVPSE
EVVKKMKNYWRQLLNAKLITQRKFDNLTKAERGGLSELDKAGFIKRQLVET
RQITKHVAQILDSRMNTKYDENDKLIREVKVITLKSKLVSDFRKDFQFYKV
REINNYHHAHDAYLNAVVGTALIKKYPKLESEFVYGDYKVYDVRKMIAKSE
QEIGKATAKYFFYSNIMNFFKTEITLANGEIRKRPLIETNGETGEIVWDKG
RDFATVRKVLSMPQVNIVKKTEVQTGGFSKESILPKRNSDKLIARKEDWDP
KKYGGFDSPTVAYSVLVVAKVEKGKSKKLKSVKELLGITIMERSSFEKNPI
DFLEAKGYKEVERDLIIKLPKYSLFELENGRKRMLASAGELQKGNELALPS
KYVNFLYLASHYEKLKGSPEDNEQKQLFVEQHKHYLDEIIEQISEFSKRVI
LADANLDKVLSAYNKHRDKPIREQAENIIHLFTLTNLGAPAAFKYFDTTID
RKRYTSTKEVLDATLIHQSITGLYETRIDLSQLGGDEGADKRTADGSEFES
PKKKRKV*

[0531] In the above sequence, the plain text denotes an adenosine deaminase sequence, bold sequence indicates sequence derived from Cas9, the italicized sequence denotes a linker sequence, underlined sequence denotes a bipartite nuclear localization sequence, and double underlined sequence indicates mutations.

[0532] In some embodiments, the base editor is ABE8.17-d, which comprises or consists essentially of the following sequence or a fragment thereof having adenosine deaminase activity:

ABE8.17-d
(SEQ ID NO: 112)
MSEVEFSHEYWMRHALTLAKRAWDEREVPVGAVLVHNNRVIGEGWNRPIGRHDPTAHAEIMALR
QGGLVMQNYRLIDATLYVTLEPCVMCAGAMIHSRIGRVVFGARDAKTGAAGSLMDVLHHPGMNH
RVEITEGILADECAALLSDFFRMRRQEIKAQKKAQSSTDSGGSSGGSSGSETPGTSESATPESS
GGSSGGSSEVEFSHEYWMRHALTLAKRARDEREVPVGAVLVLNNRVIGEGWNRAIGLHDPTAHA
EIMALRQGGLVMQNYRLIDATLYSTFEPCVMCAGAMIHSRIGRVVFGVRNAKTGAAGSLMDVLH
YPGMNHRVEITEGILADECAALLCYFFRMPRRVFNAQKKAQSSTDSGGSSGGSSGSETPGTSES
ATPESSGGSSGGSDKKYSIGLAIGTNSVGWAVITDEYKVPSKKFKVLGNTDRHSIKKNLIGALL
FDSGETAEATRLKRTARRRYTRRKNRICYLQEIFSNEMAKVDDSFFHRLEESFLVEEDKKHERH
PIFGNIVDEVAYHEKYPTIYHLRKKLVDSTDKADLRLIYLALAHMIKERGHFLIEGDLNPDNSD
VDKLFIQLVQTYNQLFEENPINASGVDAKAILSARLSKSRRLENLIAQLPGEKKNGLFGNLIAL
SLGLTPNEKSNEDLAEDAKLQLSKDTYDDDLDNLLAQIGDQYADLFLAAKNLSDAILLSDILRV
NTEITKAPLSASMIKRYDEHHQDLTLLKALVRQQLPEKYKEIFFDQSKNGYAGYIDGGASQEEF
YKFIKPILEKMDGTEELLVKLNREDLLRKQRTFDNGSIPHQIHLGELHAILRRQEDFYPFLKDN
REKIEKILTFRIPYYVGPLARGNSRFAWMTRKSEETITPWNFEEVVDKGASAQSFIERMTNEDK
NLPNEKVLPKHSLLYEYFTVYNELTKVKYVTEGMRKPAFLSGEQKKAIVDLLFKTNRKVTVKQL
KEDYFKKIECFDSVEISGVEDRFNASLGTYHDLLKIIKDKDFLDNEENEDILEDIVLTLTLFED
REMIEERLKTYAHLFDDKVMKQLKRRRYTGWGRLSRKLINGIRDKQSGKTILDFLKSDGFANRN
FMQLIHDDSLTFKEDIQKAQVSGQGDSLHEHIANLAGSPAIKKGILQTVKVVDELVKVMGRHKP
ENIVIEMARENQTTQKGQKNSRERMKRIEEGIKELGSQILKEHPVENTQLQNEKLYLYYLQNGR
DMYVDQELDINRLSDYDVDHIVPQSFLKDDSIDNKVLTRSDKNRGKSDNVPSEEVVKKMKNYWR
QLLNAKLITQRKFDNLTKAERGGLSELDKAGFIKRQLVETRQITKHVAQILDSRMNTKYDENDK
LIREVKVITLKSKLVSDFRKDFQFYKVREINNYHHAHDAYLNAVVGTALIKKYPKLESEFVYGD
YKVYDVRKMIAKSEQEIGKATAKYFFYSNIMNFFKTEITLANGEIRKRPLIETNGETGEIVWDK
GRDFATVRKVLSMPQVNIVKKTEVQTGGFSKESILPKRNSDKLIARKKDWDPKKYGGFDSPTVA
YSVLVVAKVEKGKSKKLKSVKELLGITIMERSSFEKNPIDELEAKGYKEVKKDLIIKLPKYSLF
ELENGRKRMLASAGELQKGNELALPSKYVNFLYLASHYEKLKGSPEDNEQKQLFVEQHKHYLDE
IIEQISEFSKRVILADANLDKVLSAYNKHRDKPIREQAENIIHLFTLTNLGAPAAFKYFDTTID
RKRYTSTKEVLDATLIHQSITGLYETRIDLSQLGGDEGADKRTADGSEFESPKKKRKV*

[0533] In the above sequence, the plain text denotes an adenosine deaminase sequence, bold sequence indicates sequence derived from Cas9, the italicized sequence denotes a linker sequence, underlined sequence denotes a bipartite nuclear localization sequence, and double underlined sequence indicates mutations.

[0534] In some embodiments, the base editor is ABE8.20-m, which comprises or consists essentially of the following sequence or a fragment thereof having adenosine deaminase activity:

ABE8.20-m
(SEQ ID NO: 113)
MSEVEFSHEYWMRHALTLAKRARDEREVPVGAVLVLNNRVIGEGWNRAIGL
HDPTAHAEIMALRQGGLVMQNYRLYDATLYSTFEPCVMCAGAMIHSRIGRV
VFGVRNAKTGAAGSLMDVLHHPGMNHRVEITEGILADECAALLCRFFRMPR
RVFNAQKKAQSSTDSGGSSGGSSGSETPGTSESATPESSGGSSGGSDKKYS
IGLAIGTNSVGWAVITDEYKVPSKKEKVLGNTDRHSIKKNLIGALLFDSGE
TAEATRLKRTARRRYTRRKNRICYLQEIFSNEMAKVDDSFFHRLEESFLVE
EDKKHERHPIFGNIVDEVAYHEKYPTIYHLRKKLVDSTDKADLRLIYLALA
HMIKERGHFLIEGDLNPDNSDVDKLFIQLVQTYNQLFEENPINASGVDAKA
ILSARLSKSRRLENLIAQLPGEKKNGLFGNLIALSLGLTPNEKSNEDLAED
AKLQLSKDTYDDDLDNLLAQIGDQYADLFLAAKNLSDAILLSDILRVNTEI
TKAPLSASMIKRYDEHHQDLTLLKALVRQQLPEKYKEIFFDQSKNGYAGYI
DGGASQEEFYKFIKPILEKMDGTEELLVKLNREDLLRKQRTFDNGSIPHQI
HLGELHAILRRQEDFYPFLKDNREKIEKILTFRIPYYVGPLARGNSRFAWM
TRKSEETITPWNFEEVVDKGASAQSFIERMTNEDKNLPNEKVLPKHSLLYE
YFTVYNELTKVKYVTEGMRKPAFLSGEQKKAIVDLLFKTNRKVTVKQLKED
YFKKIECFDSVEISGVEDRFNASLGTYHDLLKIIKDKDFLDNEENEDILED
IVLTLTLFEDREMIEERLKTYAHLFDDKVMKQLKRRRYTGWGRLSRKLING
IRDKQSGKTILDFLKSDGFANRNFMQLIHDDSLTEKEDIQKAQVSGQGDSL
HEHIANLAGSPAIKKGILQTVKVVDELVKVMGRHKPENIVIEMARENQTTQ
KGQKNSRERMKRIEEGIKELGSQILKEHPVENTQLQNEKLYLYYLQNGRDM
YVDQELDINRLSDYDVDHIVPQSFLKDDSIDNKVLTRSDKNRGKSDNVPSE
EVVKKMKNYWRQLLNAKLITQRKFDNLTKAERGGLSELDKAGFIKRQLVET
RQITKHVAQILDSRMNTKYDENDKLIREVKVITLKSKLVSDFRKDFQFYKV
REINNYHHAHDAYLNAVVGTALIKKYPKLESEFVYGDYKVYDVRKMIAKSE
QEIGKATAKYFFYSNIMNFFKTEITLANGEIRKRPLIETNGETGEIVWDKG
RDFATVRKVLSMPQVNIVKKTEVQTGGFSKESILPKRNSDKLIARKKDWDP
KKYGGFDSPTVAYSVLVVAKVEKGKSKKLKSVKELLGITIMERSSFEKNPI
DFLEAKGYKEVKKDLIIKLPKYSLFELENGRKRMLASAGELQKGNELALPS
KYVNFLYLASHYEKLKGSPEDNEQKQLFVEQHKHYLDEIIEQISEFSKRVI
LADANLDKVLSAYNKHRDKPIREQAENIIHLFTLTNLGAPAAFKYFDTTID
RKRYTSTKEVLDATLIHQSITGLYETRIDLSQLGGDEGADKRTADGSEFES
PKKKRKV*

[0535] In the above sequence, the plain text denotes an adenosine deaminase sequence, bold sequence indicates sequence derived from Cas9, the italicized sequence denotes a linker sequence, underlined sequence denotes a bipartite nuclear localization sequence, and double underlined sequence indicates mutations.

[0536] In some embodiments, the base editor is ABE8.20-d, which comprises or consists essentially of the following sequence or a fragment thereof having adenosine deaminase activity:

ABE8.20-d
(SEQ ID NO: 114)
MSEVEFSHEYWMRHALTLAKRAWDEREVPVGAVLVHNNRVIGEGWNRPIGRHDPTAHAEIMALR
QGGLVMQNYRLIDATLYVTLEPCVMCAGAMIHSRIGRVVFGARDAKTGAAGSLMDVLHHPGMNH
RVEITEGILADECAALLSDFFRMRRQEIKAQKKAQSSTDSGGSSGGSSGSETPGTSESATPESS
GGSSGGSSEVEFSHEYWMRHALTLAKRARDEREVPVGAVLVLNNRVIGEGWNRAIGLHDPTAHA
EIMALRQGGLVMQNYRLYDATLYSTFEPCVMCAGAMIHSRIGRVVFGVRNAKTGAAGSLMDVLH
HPGMNHRVEITEGILADECAALLCRFFRMPRRVFNAQKKAQSSTDSGGSSGGSSGSETPGTSES
ATPESSGGSSGGSDKKYSIGLAIGTNSVGWAVITDEYKVPSKKFKVLGNTDRHSIKKNLIGALL
FDSGETAEATRLKRTARRRYTRRKNRICYLQEIFSNEMAKVDDSFFHRLEESFLVEEDKKHERH
PIFGNIVDEVAYHEKYPTIYHLRKKLVDSTDKADLRLIYLALAHMIKFRGHFLIEGDLNPDNSD
VDKLFIQLVQTYNQLFEENPINASGVDAKAILSARLSKSRRLENLIAQLPGEKKNGLFGNLIAL
SLGLTPNFKSNFDLAEDAKLQLSKDTYDDDLDNLLAQIGDQYADLFLAAKNLSDAILLSDILRV
NTEITKAPLSASMIKRYDEHHQDLTLLKALVRQQLPEKYKEIFFDQSKNGYAGYIDGGASQEEF
YKFIKPILEKMDGTEELLVKLNREDLLRKQRTFDNGSIPHQIHLGELHAILRRQEDFYPFLKDN
REKIEKILTFRIPYYVGPLARGNSRFAWMTRKSEETITPWNFEEVVDKGASAQSFIERMTNFDK
NLPNEKVLPKHSLLYEYFTVYNELTKVKYVTEGMRKPAFLSGEQKKAIVDLLFKTNRKVTVKQL
KEDYFKKIECFDSVEISGVEDRFNASLGTYHDLLKIIKDKDFLDNEENEDILEDIVLTLTLFED
REMIEERLKTYAHLFDDKVMKQLKRRRYTGWGRLSRKLINGIRDKQSGKTILDFLKSDGFANRN
FMQLIHDDSLTFKEDIQKAQVSGQGDSLHEHIANLAGSPAIKKGILQTVKVVDELVKVMGRHKP
ENIVIEMARENQTTQKGQKNSRERMKRIEEGIKELGSQILKEHPVENTQLQNEKLYLYYLQNGR
DMYVDQELDINRLSDYDVDHIVPQSFLKDDSIDNKVLTRSDKNRGKSDNVPSEEVVKKMKNYWR
QLLNAKLITQRKFDNLTKAERGGLSELDKAGFIKRQLVETRQITKHVAQILDSRMNTKYDENDK
LIREVKVITLKSKLVSDFRKDFQFYKVREINNYHHAHDAYLNAVVGTALIKKYPKLESEFVYGD
YKVYDVRKMIAKSEQEIGKATAKYFFYSNIMNFFKTEITLANGEIRKRPLIETNGETGEIVWDK
GRDFATVRKVLSMPQVNIVKKTEVQTGGFSKESILPKRNSDKLIARKKDWDPKKYGGFDSPTVA
YSVLVVAKVEKGKSKKLKSVKELLGITIMERSSFEKNPIDFLEAKGYKEVKKDLIIKLPKYSLF
ELENGRKRMLASAGELQKGNELALPSKYVNFLYLASHYEKLKGSPEDNEQKQLFVEQHKHYLDE
IIEQISEFSKRVILADANLDKVLSAYNKHRDKPIREQAENIIHLFTLTNLGAPAAFKYFDTTID
RKRYTSTKEVLDATLIHQSITGLYETRIDLSQLGGDEGADKRTADGSEFESPKKKRKV*

[0537] In the above sequence, the plain text denotes an adenosine deaminase sequence, bold sequence indicates sequence derived from Cas9, the italicized sequence denotes a linker sequence, underlined sequence denotes a bipartite nuclear localization sequence, and double underlined sequence indicates mutations.

[0538] In some embodiments, an ABE8 of the invention is selected from the following sequences:

01. monoABE8.1_bpNLS + Y147T
(SEQ ID NO: 115)
MSEVEFSHEYWMRHALTLAKRARDEREVPVGAVLVLNNRVIGEGWNRAIGLHDPTAHAEIMALRQGGLVM
QNYRLIDATLYVTFEPCVMCAGAMIHSRIGRVVFGVRNAKTGAAGSLMDVLHYPGMNHRVEITEGILADE
CAALLCTFFRMPRQVFNAQKKAQSSTDSGGSSGGSSGSETPGTSESATPESSGGSSGGSDKKYSIGLAIG
TNSVGWAVITDEYKVPSKKFKVLGNTDRHSIKKNLIGALLFDSGETAEATRLKRTARRRYTRRKNRICYL
QEIFSNEMAKVDDSFFHRLEESFLVEEDKKHERHPIFGNIVDEVAYHEKYPTIYHLRKKLVDSTDKADLR
LIYLALAHMIKFRGHFLIEGDLNPDNSDVDKLFIQLVQTYNQLFEENPINASGVDAKAILSARLSKSRRL
ENLIAQLPGEKKNGLFGNLIALSLGLTPNFKSNFDLAEDAKLQLSKDTYDDDLDNLLAQIGDQYADLFLA
AKNLSDAILLSDILRVNTEITKAPLSASMIKRYDEHHQDLTLLKALVRQQLPEKYKEIFFDQSKNGYAGY
IDGGASQEEFYKFIKPILEKMDGTEELLVKLNREDLLRKQRTFDNGSIPHQIHLGELHAILRRQEDFYPF
LKDNREKIEKILTFRIPYYVGPLARGNSRFAWMTRKSEETITPWNFEEVVDKGASAQSFIERMTNFDKNL
PNEKVLPKHSLLYEYFTVYNELTKVKYVTEGMRKPAFLSGEQKKAIVDLLFKTNRKVTVKQLKEDYFKKI
ECFDSVEISGVEDRFNASLGTYHDLLKIIKDKDFLDNEENEDILEDIVLTLTLFEDREMIEERLKTYAHL
FDDKVMKQLKRRRYTGWGRLSRKLINGIRDKQSGKTILDFLKSDGFANRNFMQLIHDDSLTFKEDIQKAQ
VSGQGDSLHEHIANLAGSPAIKKGILQTVKVVDELVKVMGRHKPENIVIEMARENQTTQKGQKNSRERMK
RIEEGIKELGSQILKEHPVENTQLQNEKLYLYYLQNGRDMYVDQELDINRLSDYDVDHIVPQSFLKDDSI
DNKVLTRSDKNRGKSDNVPSEEVVKKMKNYWRQLLNAKLITQRKFDNLTKAERGGLSELDKAGFIKRQLV
ETRQITKHVAQILDSRMNTKYDENDKLIREVKVITLKSKLVSDFRKDFQFYKVREINNYHHAHDAYLNAV
VGTALIKKYPKLESEFVYGDYKVYDVRKMIAKSEQEIGKATAKYFFYSNIMNFFKTEITLANGEIRKRPL
IETNGETGEIVWDKGRDFATVRKVLSMPQVNIVKKTEVQTGGFSKESILPKRNSDKLIARKKDWDPKKYG
GFVSPTVAYSVLVVAKVEKGKSKKLKSVKELLGITIMERSSFEKNPIDFLEAKGYKEVKKDLIIKLPKYS
LFELENGRKRMLASARELQKGNELALPSKYVNFLYLASHYEKLKGSPEDNEQKQLFVEQHKHYLDEIIEQ
ISEFSKRVILADANLDKVLSAYNKHRDKPIREQAENIIHLFTLTNLGAPAAFKYFDTTIDRKQYRSTKEV
LDATLIHQSITGLYETRIDLSQLGGDEGADKRTADGSEFESPKKKRKV
02. monoABE8.1_bpNLS + Y147R
(SEQ ID NO: 116)
MSEVEFSHEYWMRHALTLAKRARDEREVPVGAVLVLNNRVIGEGWNRAIGLHDPTAHAEIMALRQGGLVM
QNYRLIDATLYVTFEPCVMCAGAMIHSRIGRVVFGVRNAKTGAAGSLMDVLHYPGMNHRVEITEGILADE
CAALLCRFFRMPRQVFNAQKKAQSSTDSGGSSGGSSGSETPGTSESATPESSGGSSGGSDKKYSIGLAIG
TNSVGWAVITDEYKVPSKKFKVLGNTDRHSIKKNLIGALLFDSGETAEATRLKRTARRRYTRRKNRICYL
QEIFSNEMAKVDDSFFHRLEESFLVEEDKKHERHPIFGNIVDEVAYHEKYPTIYHLRKKLVDSTDKADLR
LIYLALAHMIKFRGHFLIEGDLNPDNSDVDKLFIQLVQTYNQLFEENPINASGVDAKAILSARLSKSRRL
ENLIAQLPGEKKNGLFGNLIALSLGLTPNFKSNFDLAEDAKLQLSKDTYDDDLDNLLAQIGDQYADLFLA
AKNLSDAILLSDILRVNTEITKAPLSASMIKRYDEHHQDLTLLKALVRQQLPEKYKEIFFDQSKNGYAGY
IDGGASQEEFYKFIKPILEKMDGTEELLVKLNREDLLRKQRTFDNGSIPHQIHLGELHAILRRQEDFYPF
LKDNREKIEKILTFRIPYYVGPLARGNSRFAWMTRKSEETITPWNFEEVVDKGASAQSFIERMTNFDKNL
PNEKVLPKHSLLYEYFTVYNELTKVKYVTEGMRKPAFLSGEQKKAIVDLLFKTNRKVTVKQLKEDYFKKI
ECFDSVEISGVEDRFNASLGTYHDLLKIIKDKDFLDNEENEDILEDIVLTLTLFEDREMIEERLKTYAHL
FDDKVMKQLKRRRYTGWGRLSRKLINGIRDKQSGKTILDFLKSDGFANRNFMQLIHDDSLTFKEDIQKAQ
VSGQGDSLHEHIANLAGSPAIKKGILQTVKVVDELVKVMGRHKPENIVIEMARENQTTQKGQKNSRERMK
RIEEGIKELGSQILKEHPVENTQLQNEKLYLYYLQNGRDMYVDQELDINRLSDYDVDHIVPQSFLKDDSI
DNKVLTRSDKNRGKSDNVPSEEVVKKMKNYWRQLLNAKLITQRKFDNLTKAERGGLSELDKAGFIKRQLV
ETRQITKHVAQILDSRMNTKYDENDKLIREVKVITLKSKLVSDFRKDFQFYKVREINNYHHAHDAYLNAV
VGTALIKKYPKLESEFVYGDYKVYDVRKMIAKSEQEIGKATAKYFFYSNIMNFFKTEITLANGEIRKRPL
IETNGETGEIVWDKGRDFATVRKVLSMPQVNIVKKTEVQTGGFSKESILPKRNSDKLIARKKDWDPKKYG
GFVSPTVAYSVLVVAKVEKGKSKKLKSVKELLGITIMERSSFEKNPIDFLEAKGYKEVKKDLIIKLPKYS
LFELENGRKRMLASARELQKGNELALPSKYVNFLYLASHYEKLKGSPEDNEQKQLFVEQHKHYLDEIIEQ
ISEFSKRVILADANLDKVLSAYNKHRDKPIREQAENIIHLFTLTNLGAPAAFKYFDTTIDRKQYRSTKEV
LDATLIHQSITGLYETRIDLSQLGGDEGADKRTADGSEFESPKKKRKV
03. monoABE8.1_bpNLS + Q154S
(SEQ ID NO: 117)
MSEVEFSHEYWMRHALTLAKRARDEREVPVGAVLVLNNRVIGEGWNRAIGLHDPTAHAEIMALRQGGLVM
QNYRLIDATLYVTFEPCVMCAGAMIHSRIGRVVFGVRNAKTGAAGSLMDVLHYPGMNHRVEITEGILADE
CAALLCYFFRMPRSVFNAQKKAQSSTDSGGSSGGSSGSETPGTSESATPESSGGSSGGSDKKYSIGLAIG
TNSVGWAVITDEYKVPSKKFKVLGNTDRHSIKKNLIGALLFDSGETAEATRLKRTARRRYTRRKNRICYL
QEIFSNEMAKVDDSFFHRLEESFLVEEDKKHERHPIFGNIVDEVAYHEKYPTIYHLRKKLVDSTDKADLR
LIYLALAHMIKFRGHFLIEGDLNPDNSDVDKLFIQLVQTYNQLFEENPINASGVDAKAILSARLSKSRRL
ENLIAQLPGEKKNGLFGNLIALSLGLTPNFKSNFDLAEDAKLQLSKDTYDDDLDNLLAQIGDQYADLFLA
AKNLSDAILLSDILRVNTEITKAPLSASMIKRYDEHHQDLTLLKALVRQQLPEKYKEIFFDQSKNGYAGY
IDGGASQEEFYKFIKPILEKMDGTEELLVKLNREDLLRKQRTFDNGSIPHQIHLGELHAILRRQEDFYPF
LKDNREKIEKILTFRIPYYVGPLARGNSRFAWMTRKSEETITPWNFEEVVDKGASAQSFIERMTNFDKNL
PNEKVLPKHSLLYEYFTVYNELTKVKYVTEGMRKPAFLSGEQKKAIVDLLFKTNRKVTVKQLKEDYFKKI
ECFDSVEISGVEDRFNASLGTYHDLLKIIKDKDFLDNEENEDILEDIVLTLTLFEDREMIEERLKTYAHL
FDDKVMKQLKRRRYTGWGRLSRKLINGIRDKQSGKTILDFLKSDGFANRNFMQLIHDDSLTFKEDIQKAQ
VSGQGDSLHEHIANLAGSPAIKKGILQTVKVVDELVKVMGRHKPENIVIEMARENQTTQKGQKNSRERMK
RIEEGIKELGSQILKEHPVENTQLQNEKLYLYYLQNGRDMYVDQELDINRLSDYDVDHIVPQSFLKDDSI
DNKVLTRSDKNRGKSDNVPSEEVVKKMKNYWRQLLNAKLITQRKFDNLTKAERGGLSELDKAGFIKRQLV
ETRQITKHVAQILDSRMNTKYDENDKLIREVKVITLKSKLVSDFRKDFQFYKVREINNYHHAHDAYLNAV
VGTALIKKYPKLESEFVYGDYKVYDVRKMIAKSEQEIGKATAKYFFYSNIMNFFKTEITLANGEIRKRPL
IETNGETGEIVWDKGRDFATVRKVLSMPQVNIVKKTEVQTGGFSKESILPKRNSDKLIARKKDWDPKKYG
GFVSPTVAYSVLVVAKVEKGKSKKLKSVKELLGITIMERSSFEKNPIDFLEAKGYKEVKKDLIIKLPKYS
LFELENGRKRMLASARELQKGNELALPSKYVNFLYLASHYEKLKGSPEDNEQKQLFVEQHKHYLDEIIEQ
ISEFSKRVILADANLDKVLSAYNKHRDKPIREQAENIIHLFTLTNLGAPAAFKYFDTTIDRKQYRSTKEV
LDATLIHQSITGLYETRIDLSQLGGDEGADKRTADGSEFESPKKKRKV
04. monoABE8.1_bpNLS + Y123H
(SEQ ID NO: 118)
MSEVEFSHEYWMRHALTLAKRARDEREVPVGAVLVLNNRVIGEGWNRAIGLHDPTAHAEIMALRQGGLVM
QNYRLIDATLYVTFEPCVMCAGAMIHSRIGRVVFGVRNAKTGAAGSLMDVLHHPGMNHRVEITEGILADE
CAALLCYFFRMPRQVFNAQKKAQSSTDSGGSSGGSSGSETPGTSESATPESSGGSSGGSDKKYSIGLAIG
TNSVGWAVITDEYKVPSKKFKVLGNTDRHSIKKNLIGALLFDSGETAEATRLKRTARRRYTRRKNRICYL
QEIFSNEMAKVDDSFFHRLEESFLVEEDKKHERHPIFGNIVDEVAYHEKYPTIYHLRKKLVDSTDKADLR
LIYLALAHMIKFRGHFLIEGDLNPDNSDVDKLFIQLVQTYNQLFEENPINASGVDAKAILSARLSKSRRL
ENLIAQLPGEKKNGLFGNLIALSLGLTPNFKSNFDLAEDAKLQLSKDTYDDDLDNLLAQIGDQYADLFLA
AKNLSDAILLSDILRVNTEITKAPLSASMIKRYDEHHQDLTLLKALVRQQLPEKYKEIFFDQSKNGYAGY
IDGGASQEEFYKFIKPILEKMDGTEELLVKLNREDLLRKQRTFDNGSIPHQIHLGELHAILRRQEDFYPF
LKDNREKIEKILTFRIPYYVGPLARGNSRFAWMTRKSEETITPWNFEEVVDKGASAQSFIERMTNFDKNL
PNEKVLPKHSLLYEYFTVYNELTKVKYVTEGMRKPAFLSGEQKKAIVDLLFKTNRKVTVKQLKEDYFKKI
ECFDSVEISGVEDRFNASLGTYHDLLKIIKDKDFLDNEENEDILEDIVLTLTLFEDREMIEERLKTYAHL
FDDKVMKQLKRRRYTGWGRLSRKLINGIRDKQSGKTILDFLKSDGFANRNFMQLIHDDSLTFKEDIQKAQ
VSGQGDSLHEHIANLAGSPAIKKGILQTVKVVDELVKVMGRHKPENIVIEMARENQTTQKGQKNSRERMK
RIEEGIKELGSQILKEHPVENTQLQNEKLYLYYLQNGRDMYVDQELDINRLSDYDVDHIVPQSFLKDDSI
DNKVLTRSDKNRGKSDNVPSEEVVKKMKNYWRQLLNAKLITQRKFDNLTKAERGGLSELDKAGFIKRQLV
ETRQITKHVAQILDSRMNTKYDENDKLIREVKVITLKSKLVSDFRKDFQFYKVREINNYHHAHDAYLNAV
VGTALIKKYPKLESEFVYGDYKVYDVRKMIAKSEQEIGKATAKYFFYSNIMNFFKTEITLANGEIRKRPL
IETNGETGEIVWDKGRDFATVRKVLSMPQVNIVKKTEVQTGGFSKESILPKRNSDKLIARKKDWDPKKYG
GFVSPTVAYSVLVVAKVEKGKSKKLKSVKELLGITIMERSSFEKNPIDFLEAKGYKEVKKDLIIKLPKYS
LFELENGRKRMLASARELQKGNELALPSKYVNFLYLASHYEKLKGSPEDNEQKQLFVEQHKHYLDEIIEQ
ISEFSKRVILADANLDKVLSAYNKHRDKPIREQAENIIHLFTLTNLGAPAAFKYFDTTIDRKQYRSTKEV
LDATLIHQSITGLYETRIDLSQLGGDEGADKRTADGSEFESPKKKRKV
05. monoABE8.1_bpNLS + V82S
(SEQ ID NO: 119)
MSEVEFSHEYWMRHALTLAKRARDEREVPVGAVLVLNNRVIGEGWNRAIGLHDPTAHAEIMALRQGGLVM
QNYRLIDATLYSTFEPCVMCAGAMIHSRIGRVVFGVRNAKTGAAGSLMDVLHYPGMNHRVEITEGILADE
CAALLCYFFRMPRQVFNAQKKAQSSTDSGGSSGGSSGSETPGTSESATPESSGGSSGGSDKKYSIGLAIG
TNSVGWAVITDEYKVPSKKFKVLGNTDRHSIKKNLIGALLFDSGETAEATRLKRTARRRYTRRKNRICYL
QEIFSNEMAKVDDSFFHRLEESFLVEEDKKHERHPIFGNIVDEVAYHEKYPTIYHLRKKLVDSTDKADLR
LIYLALAHMIKFRGHFLIEGDLNPDNSDVDKLFIQLVQTYNQLFEENPINASGVDAKAILSARLSKSRRL
ENLIAQLPGEKKNGLFGNLIALSLGLTPNFKSNFDLAEDAKLQLSKDTYDDDLDNLLAQIGDQYADLFLA
AKNLSDAILLSDILRVNTEITKAPLSASMIKRYDEHHQDLTLLKALVRQQLPEKYKEIFFDQSKNGYAGY
IDGGASQEEFYKFIKPILEKMDGTEELLVKLNREDLLRKQRTFDNGSIPHQIHLGELHAILRRQEDFYPF
LKDNREKIEKILTFRIPYYVGPLARGNSRFAWMTRKSEETITPWNFEEVVDKGASAQSFIERMTNFDKNL
PNEKVLPKHSLLYEYFTVYNELTKVKYVTEGMRKPAFLSGEQKKAIVDLLFKTNRKVTVKQLKEDYFKKI
ECFDSVEISGVEDRFNASLGTYHDLLKIIKDKDFLDNEENEDILEDIVLTLTLFEDREMIEERLKTYAHL
FDDKVMKQLKRRRYTGWGRLSRKLINGIRDKQSGKTILDFLKSDGFANRNFMQLIHDDSLTFKEDIQKAQ
VSGQGDSLHEHIANLAGSPAIKKGILQTVKVVDELVKVMGRHKPENIVIEMARENQTTQKGQKNSRERMK
RIEEGIKELGSQILKEHPVENTQLQNEKLYLYYLQNGRDMYVDQELDINRLSDYDVDHIVPQSFLKDDSI
DNKVLTRSDKNRGKSDNVPSEEVVKKMKNYWRQLLNAKLITQRKFDNLTKAERGGLSELDKAGFIKRQLV
ETRQITKHVAQILDSRMNTKYDENDKLIREVKVITLKSKLVSDFRKDFQFYKVREINNYHHAHDAYLNAV
VGTALIKKYPKLESEFVYGDYKVYDVRKMIAKSEQEIGKATAKYFFYSNIMNFFKTEITLANGEIRKRPL
IETNGETGEIVWDKGRDFATVRKVLSMPQVNIVKKTEVQTGGFSKESILPKRNSDKLIARKKDWDPKKYG
GFVSPTVAYSVLVVAKVEKGKSKKLKSVKELLGITIMERSSFEKNPIDFLEAKGYKEVKKDLIIKLPKYS
LFELENGRKRMLASARELQKGNELALPSKYVNFLYLASHYEKLKGSPEDNEQKQLFVEQHKHYLDEIIEQ
ISEFSKRVILADANLDKVLSAYNKHRDKPIREQAENIIHLFTLTNLGAPAAFKYFDTTIDRKQYRSTKEV
LDATLIHQSITGLYETRIDLSQLGGDEGADKRTADGSEFESPKKKRKV
06. monoABE8.1_bpNLS + T166R
(SEQ ID NO: 120)
MSEVEFSHEYWMRHALTLAKRARDEREVPVGAVLVLNNRVIGEGWNRAIGLHDPTAHAEIMALRQGGLVM
QNYRLIDATLYVTFEPCVMCAGAMIHSRIGRVVFGVRNAKTGAAGSLMDVLHYPGMNHRVEITEGILADE
CAALLCYFFRMPRQVFNAQKKAQSSRDSGGSSGGSSGSETPGTSESATPESSGGSSGGSDKKYSIGLAIG
TNSVGWAVITDEYKVPSKKFKVLGNTDRHSIKKNLIGALLFDSGETAEATRLKRTARRRYTRRKNRICYL
QEIFSNEMAKVDDSFFHRLEESFLVEEDKKHERHPIFGNIVDEVAYHEKYPTIYHLRKKLVDSTDKADLR
LIYLALAHMIKFRGHFLIEGDLNPDNSDVDKLFIQLVQTYNQLFEENPINASGVDAKAILSARLSKSRRL
ENLIAQLPGEKKNGLFGNLIALSLGLTPNFKSNFDLAEDAKLQLSKDTYDDDLDNLLAQIGDQYADLFLA
AKNLSDAILLSDILRVNTEITKAPLSASMIKRYDEHHQDLTLLKALVRQQLPEKYKEIFFDQSKNGYAGY
IDGGASQEEFYKFIKPILEKMDGTEELLVKLNREDLLRKQRTFDNGSIPHQIHLGELHAILRRQEDFYPF
LKDNREKIEKILTFRIPYYVGPLARGNSRFAWMTRKSEETITPWNFEEVVDKGASAQSFIERMTNFDKNL
PNEKVLPKHSLLYEYFTVYNELTKVKYVTEGMRKPAFLSGEQKKAIVDLLFKTNRKVTVKQLKEDYFKKI
ECFDSVEISGVEDRFNASLGTYHDLLKIIKDKDFLDNEENEDILEDIVLTLTLFEDREMIEERLKTYAHL
FDDKVMKQLKRRRYTGWGRLSRKLINGIRDKQSGKTILDFLKSDGFANRNFMQLIHDDSLTFKEDIQKAQ
VSGQGDSLHEHIANLAGSPAIKKGILQTVKVVDELVKVMGRHKPENIVIEMARENQTTQKGQKNSRERMK
RIEEGIKELGSQILKEHPVENTQLQNEKLYLYYLQNGRDMYVDQELDINRLSDYDVDHIVPQSFLKDDSI
DNKVLTRSDKNRGKSDNVPSEEVVKKMKNYWRQLLNAKLITQRKFDNLTKAERGGLSELDKAGFIKRQLV
ETRQITKHVAQILDSRMNTKYDENDKLIREVKVITLKSKLVSDFRKDFQFYKVREINNYHHAHDAYLNAV
VGTALIKKYPKLESEFVYGDYKVYDVRKMIAKSEQEIGKATAKYFFYSNIMNFFKTEITLANGEIRKRPL
IETNGETGEIVWDKGRDFATVRKVLSMPQVNIVKKTEVQTGGFSKESILPKRNSDKLIARKKDWDPKKYG
GFVSPTVAYSVLVVAKVEKGKSKKLKSVKELLGITIMERSSFEKNPIDFLEAKGYKEVKKDLIIKLPKYS
LFELENGRKRMLASARELQKGNELALPSKYVNFLYLASHYEKLKGSPEDNEQKQLFVEQHKHYLDEIIEQ
ISEFSKRVILADANLDKVLSAYNKHRDKPIREQAENIIHLFTLTNLGAPAAFKYFDTTIDRKQYRSTKEV
LDATLIHQSITGLYETRIDLSQLGGDEGADKRTADGSEFESPKKKRKV
07. monoABE8.1_bpNLS + Q154R
(SEQ ID NO: 121)
MSEVEFSHEYWMRHALTLAKRARDEREVPVGAVLVLNNRVIGEGWNRAIGLHDPTAHAEIMALRQGGLVM
QNYRLIDATLYVTFEPCVMCAGAMIHSRIGRVVFGVRNAKTGAAGSLMDVLHYPGMNHRVEITEGILADE
CAALLCYFFRMPRRVFNAQKKAQSSTDSGGSSGGSSGSETPGTSESATPESSGGSSGGSDKKYSIGLAIG
TNSVGWAVITDEYKVPSKKFKVLGNTDRHSIKKNLIGALLFDSGETAEATRLKRTARRRYTRRKNRICYL
QEIFSNEMAKVDDSFFHRLEESFLVEEDKKHERHPIFGNIVDEVAYHEKYPTIYHLRKKLVDSTDKADLR
LIYLALAHMIKFRGHFLIEGDLNPDNSDVDKLFIQLVQTYNQLFEENPINASGVDAKAILSARLSKSRRL
ENLIAQLPGEKKNGLFGNLIALSLGLTPNFKSNFDLAEDAKLQLSKDTYDDDLDNLLAQIGDQYADLFLA
AKNLSDAILLSDILRVNTEITKAPLSASMIKRYDEHHQDLTLLKALVRQQLPEKYKEIFFDQSKNGYAGY
IDGGASQEEFYKFIKPILEKMDGTEELLVKLNREDLLRKQRTFDNGSIPHQIHLGELHAILRRQEDFYPF
LKDNREKIEKILTFRIPYYVGPLARGNSRFAWMTRKSEETITPWNFEEVVDKGASAQSFIERMTNFDKNL
PNEKVLPKHSLLYEYFTVYNELTKVKYVTEGMRKPAFLSGEQKKAIVDLLFKTNRKVTVKQLKEDYFKKI
ECFDSVEISGVEDRFNASLGTYHDLLKIIKDKDFLDNEENEDILEDIVLTLTLFEDREMIEERLKTYAHL
FDDKVMKQLKRRRYTGWGRLSRKLINGIRDKQSGKTILDFLKSDGFANRNFMQLIHDDSLTFKEDIQKAQ
VSGQGDSLHEHIANLAGSPAIKKGILQTVKVVDELVKVMGRHKPENIVIEMARENQTTQKGQKNSRERMK
RIEEGIKELGSQILKEHPVENTQLQNEKLYLYYLQNGRDMYVDQELDINRLSDYDVDHIVPQSFLKDDSI
DNKVLTRSDKNRGKSDNVPSEEVVKKMKNYWRQLLNAKLITQRKFDNLTKAERGGLSELDKAGFIKRQLV
ETRQITKHVAQILDSRMNTKYDENDKLIREVKVITLKSKLVSDFRKDFQFYKVREINNYHHAHDAYLNAV
VGTALIKKYPKLESEFVYGDYKVYDVRKMIAKSEQEIGKATAKYFFYSNIMNFFKTEITLANGEIRKRPL
IETNGETGEIVWDKGRDFATVRKVLSMPQVNIVKKTEVQTGGFSKESILPKRNSDKLIARKKDWDPKKYG
GFVSPTVAYSVLVVAKVEKGKSKKLKSVKELLGITIMERSSFEKNPIDFLEAKGYKEVKKDLIIKLPKYS
LFELENGRKRMLASARELQKGNELALPSKYVNFLYLASHYEKLKGSPEDNEQKQLFVEQHKHYLDEIIEQ
ISEFSKRVILADANLDKVLSAYNKHRDKPIREQAENIIHLFTLTNLGAPAAFKYFDTTIDRKQYRSTKEV
LDATLIHQSITGLYETRIDLSQLGGDEGADKRTADGSEFESPKKKRKV
08. monoABE8.1_bpNLS + Y147R_Q154R_Y123H
(SEQ ID NO: 122)
MSEVEFSHEYWMRHALTLAKRARDEREVPVGAVLVLNNRVIGEGWNRAIGLHDPTAHAEIMALRQGGLVM
QNYRLIDATLYVTFEPCVMCAGAMIHSRIGRVVFGVRNAKTGAAGSLMDVLHHPGMNHRVEITEGILADE
CAALLCRFFRMPRRVFNAQKKAQSSTDSGGSSGGSSGSETPGTSESATPESSGGSSGGSDKKYSIGLAIG
TNSVGWAVITDEYKVPSKKFKVLGNTDRHSIKKNLIGALLFDSGETAEATRLKRTARRRYTRRKNRICYL
QEIFSNEMAKVDDSFFHRLEESFLVEEDKKHERHPIFGNIVDEVAYHEKYPTIYHLRKKLVDSTDKADLR
LIYLALAHMIKFRGHFLIEGDLNPDNSDVDKLFIQLVQTYNQLFEENPINASGVDAKAILSARLSKSRRL
ENLIAQLPGEKKNGLFGNLIALSLGLTPNFKSNFDLAEDAKLQLSKDTYDDDLDNLLAQIGDQYADLFLA
AKNLSDAILLSDILRVNTEITKAPLSASMIKRYDEHHQDLTLLKALVRQQLPEKYKEIFFDQSKNGYAGY
IDGGASQEEFYKFIKPILEKMDGTEELLVKLNREDLLRKQRTFDNGSIPHQIHLGELHAILRRQEDFYPF
LKDNREKIEKILTFRIPYYVGPLARGNSRFAWMTRKSEETITPWNFEEVVDKGASAQSFIERMTNFDKNL
PNEKVLPKHSLLYEYFTVYNELTKVKYVTEGMRKPAFLSGEQKKAIVDLLFKTNRKVTVKQLKEDYFKKI
ECFDSVEISGVEDRFNASLGTYHDLLKIIKDKDFLDNEENEDILEDIVLTLTLFEDREMIEERLKTYAHL
FDDKVMKQLKRRRYTGWGRLSRKLINGIRDKQSGKTILDFLKSDGFANRNFMQLIHDDSLTFKEDIQKAQ
VSGQGDSLHEHIANLAGSPAIKKGILQTVKVVDELVKVMGRHKPENIVIEMARENQTTQKGQKNSRERMK
RIEEGIKELGSQILKEHPVENTQLQNEKLYLYYLQNGRDMYVDQELDINRLSDYDVDHIVPQSFLKDDSI
DNKVLTRSDKNRGKSDNVPSEEVVKKMKNYWRQLLNAKLITQRKFDNLTKAERGGLSELDKAGFIKRQLV
ETRQITKHVAQILDSRMNTKYDENDKLIREVKVITLKSKLVSDFRKDFQFYKVREINNYHHAHDAYLNAV
VGTALIKKYPKLESEFVYGDYKVYDVRKMIAKSEQEIGKATAKYFFYSNIMNFFKTEITLANGEIRKRPL
IETNGETGEIVWDKGRDFATVRKVLSMPQVNIVKKTEVQTGGFSKESILPKRNSDKLIARKKDWDPKKYG
GFVSPTVAYSVLVVAKVEKGKSKKLKSVKELLGITIMERSSFEKNPIDFLEAKGYKEVKKDLIIKLPKYS
LFELENGRKRMLASARELQKGNELALPSKYVNFLYLASHYEKLKGSPEDNEQKQLFVEQHKHYLDEIIEQ
ISEFSKRVILADANLDKVLSAYNKHRDKPIREQAENIIHLFTLTNLGAPAAFKYFDTTIDRKQYRSTKEV
LDATLIHQSITGLYETRIDLSQLGGDEGADKRTADGSEFESPKKKRKV
09. monoABE8.1_bpNLS + Y147R_Q154R_I76Y
(SEQ ID NO: 123)
MSEVEFSHEYWMRHALTLAKRARDEREVPVGAVLVLNNRVIGEGWNRAIGLHDPTAHAEIMALRQGGLVM
QNYRLYDATLYVTFEPCVMCAGAMIHSRIGRVVFGVRNAKTGAAGSLMDVLHYPGMNHRVEITEGILADE
CAALLCRFFRMPRRVFNAQKKAQSSTDSGGSSGGSSGSETPGTSESATPESSGGSSGGSDKKYSIGLAIG
TNSVGWAVITDEYKVPSKKFKVLGNTDRHSIKKNLIGALLFDSGETAEATRLKRTARRRYTRRKNRICYL
QEIFSNEMAKVDDSFFHRLEESFLVEEDKKHERHPIFGNIVDEVAYHEKYPTIYHLRKKLVDSTDKADLR
LIYLALAHMIKFRGHFLIEGDLNPDNSDVDKLFIQLVQTYNQLFEENPINASGVDAKAILSARLSKSRRL
ENLIAQLPGEKKNGLFGNLIALSLGLTPNFKSNFDLAEDAKLQLSKDTYDDDLDNLLAQIGDQYADLFLA
AKNLSDAILLSDILRVNTEITKAPLSASMIKRYDEHHQDLTLLKALVRQQLPEKYKEIFFDQSKNGYAGY
IDGGASQEEFYKFIKPILEKMDGTEELLVKLNREDLLRKQRTFDNGSIPHQIHLGELHAILRRQEDFYPF
LKDNREKIEKILTFRIPYYVGPLARGNSRFAWMTRKSEETITPWNFEEVVDKGASAQSFIERMTNFDKNL
PNEKVLPKHSLLYEYFTVYNELTKVKYVTEGMRKPAFLSGEQKKAIVDLLFKTNRKVTVKQLKEDYFKKI
ECFDSVEISGVEDRFNASLGTYHDLLKIIKDKDFLDNEENEDILEDIVLTLTLFEDREMIEERLKTYAHL
FDDKVMKQLKRRRYTGWGRLSRKLINGIRDKQSGKTILDFLKSDGFANRNFMQLIHDDSLTFKEDIQKAQ
VSGQGDSLHEHIANLAGSPAIKKGILQTVKVVDELVKVMGRHKPENIVIEMARENQTTQKGQKNSRERMK
RIEEGIKELGSQILKEHPVENTQLQNEKLYLYYLQNGRDMYVDQELDINRLSDYDVDHIVPQSFLKDDSI
DNKVLTRSDKNRGKSDNVPSEEVVKKMKNYWRQLLNAKLITQRKFDNLTKAERGGLSELDKAGFIKRQLV
ETRQITKHVAQILDSRMNTKYDENDKLIREVKVITLKSKLVSDFRKDFQFYKVREINNYHHAHDAYLNAV
VGTALIKKYPKLESEFVYGDYKVYDVRKMIAKSEQEIGKATAKYFFYSNIMNFFKTEITLANGEIRKRPL
IETNGETGEIVWDKGRDFATVRKVLSMPQVNIVKKTEVQTGGFSKESILPKRNSDKLIARKKDWDPKKYG
GFVSPTVAYSVLVVAKVEKGKSKKLKSVKELLGITIMERSSFEKNPIDFLEAKGYKEVKKDLIIKLPKYS
LFELENGRKRMLASARELQKGNELALPSKYVNFLYLASHYEKLKGSPEDNEQKQLFVEQHKHYLDEIIEQ
ISEFSKRVILADANLDKVLSAYNKHRDKPIREQAENIIHLFTLTNLGAPAAFKYFDTTIDRKQYRSTKEV
LDATLIHQSITGLYETRIDLSQLGGDEGADKRTADGSEFESPKKKRKV
10. monoABE8.1_bpNLS + Y147R_Q154R_T166R
(SEQ ID NO: 124)
MSEVEFSHEYWMRHALTLAKRARDEREVPVGAVLVLNNRVIGEGWNRAIGLHDPTAHAEIMALRQGGLVM
QNYRLIDATLYVTFEPCVMCAGAMIHSRIGRVVFGVRNAKTGAAGSLMDVLHYPGMNHRVEITEGILADE
CAALLCRFFRMPRRVFNAQKKAQSSRDSGGSSGGSSGSETPGTSESATPESSGGSSGGSDKKYSIGLAIG
TNSVGWAVITDEYKVPSKKFKVLGNTDRHSIKKNLIGALLFDSGETAEATRLKRTARRRYTRRKNRICYL
QEIFSNEMAKVDDSFFHRLEESFLVEEDKKHERHPIFGNIVDEVAYHEKYPTIYHLRKKLVDSTDKADLR
LIYLALAHMIKFRGHFLIEGDLNPDNSDVDKLFIQLVQTYNQLFEENPINASGVDAKAILSARLSKSRRL
ENLIAQLPGEKKNGLFGNLIALSLGLTPNFKSNFDLAEDAKLQLSKDTYDDDLDNLLAQIGDQYADLFLA
AKNLSDAILLSDILRVNTEITKAPLSASMIKRYDEHHQDLTLLKALVRQQLPEKYKEIFFDQSKNGYAGY
IDGGASQEEFYKFIKPILEKMDGTEELLVKLNREDLLRKQRTFDNGSIPHQIHLGELHAILRRQEDFYPF
LKDNREKIEKILTFRIPYYVGPLARGNSRFAWMTRKSEETITPWNFEEVVDKGASAQSFIERMTNFDKNL
PNEKVLPKHSLLYEYFTVYNELTKVKYVTEGMRKPAFLSGEQKKAIVDLLFKTNRKVTVKQLKEDYFKKI
ECFDSVEISGVEDRFNASLGTYHDLLKIIKDKDFLDNEENEDILEDIVLTLTLFEDREMIEERLKTYAHL
FDDKVMKQLKRRRYTGWGRLSRKLINGIRDKQSGKTILDFLKSDGFANRNFMQLIHDDSLTFKEDIQKAQ
VSGQGDSLHEHIANLAGSPAIKKGILQTVKVVDELVKVMGRHKPENIVIEMARENQTTQKGQKNSRERMK
RIEEGIKELGSQILKEHPVENTQLQNEKLYLYYLQNGRDMYVDQELDINRLSDYDVDHIVPQSFLKDDSI
DNKVLTRSDKNRGKSDNVPSEEVVKKMKNYWRQLLNAKLITQRKFDNLTKAERGGLSELDKAGFIKRQLV
ETRQITKHVAQILDSRMNTKYDENDKLIREVKVITLKSKLVSDFRKDFQFYKVREINNYHHAHDAYLNAV
VGTALIKKYPKLESEFVYGDYKVYDVRKMIAKSEQEIGKATAKYFFYSNIMNFFKTEITLANGEIRKRPL
IETNGETGEIVWDKGRDFATVRKVLSMPQVNIVKKTEVQTGGFSKESILPKRNSDKLIARKKDWDPKKYG
GFVSPTVAYSVLVVAKVEKGKSKKLKSVKELLGITIMERSSFEKNPIDFLEAKGYKEVKKDLIIKLPKYS
LFELENGRKRMLASARELQKGNELALPSKYVNFLYLASHYEKLKGSPEDNEQKQLFVEQHKHYLDEIIEQ
ISEFSKRVILADANLDKVLSAYNKHRDKPIREQAENIIHLFTLTNLGAPAAFKYFDTTIDRKQYRSTKEV
LDATLIHQSITGLYETRIDLSQLGGDEGADKRTADGSEFESPKKKRKV
11. monoABE8.1_bpNLS + Y147T_Q154R
(SEQ ID NO: 125)
MSEVEFSHEYWMRHALTLAKRARDEREVPVGAVLVLNNRVIGEGWNRAIGLHDPTAHAEIMALRQGGLVM
QNYRLIDATLYVTFEPCVMCAGAMIHSRIGRVVFGVRNAKTGAAGSLMDVLHYPGMNHRVEITEGILADE
CAALLCTFFRMPRRVFNAQKKAQSSTDSGGSSGGSSGSETPGTSESATPESSGGSSGGSDKKYSIGLAIG
TNSVGWAVITDEYKVPSKKFKVLGNTDRHSIKKNLIGALLFDSGETAEATRLKRTARRRYTRRKNRICYL
QEIFSNEMAKVDDSFFHRLEESFLVEEDKKHERHPIFGNIVDEVAYHEKYPTIYHLRKKLVDSTDKADLR
LIYLALAHMIKFRGHFLIEGDLNPDNSDVDKLFIQLVQTYNQLFEENPINASGVDAKAILSARLSKSRRL
ENLIAQLPGEKKNGLFGNLIALSLGLTPNFKSNFDLAEDAKLQLSKDTYDDDLDNLLAQIGDQYADLFLA
AKNLSDAILLSDILRVNTEITKAPLSASMIKRYDEHHQDLTLLKALVRQQLPEKYKEIFFDQSKNGYAGY
IDGGASQEEFYKFIKPILEKMDGTEELLVKLNREDLLRKQRTFDNGSIPHQIHLGELHAILRRQEDFYPF
LKDNREKIEKILTFRIPYYVGPLARGNSRFAWMTRKSEETITPWNFEEVVDKGASAQSFIERMTNFDKNL
PNEKVLPKHSLLYEYFTVYNELTKVKYVTEGMRKPAFLSGEQKKAIVDLLFKTNRKVTVKQLKEDYFKKI
ECFDSVEISGVEDRFNASLGTYHDLLKIIKDKDFLDNEENEDILEDIVLTLTLFEDREMIEERLKTYAHL
FDDKVMKQLKRRRYTGWGRLSRKLINGIRDKQSGKTILDFLKSDGFANRNFMQLIHDDSLTFKEDIQKAQ
VSGQGDSLHEHIANLAGSPAIKKGILQTVKVVDELVKVMGRHKPENIVIEMARENQTTQKGQKNSRERMK
RIEEGIKELGSQILKEHPVENTQLQNEKLYLYYLQNGRDMYVDQELDINRLSDYDVDHIVPQSFLKDDSI
DNKVLTRSDKNRGKSDNVPSEEVVKKMKNYWRQLLNAKLITQRKFDNLTKAERGGLSELDKAGFIKRQLV
ETRQITKHVAQILDSRMNTKYDENDKLIREVKVITLKSKLVSDFRKDFQFYKVREINNYHHAHDAYLNAV
VGTALIKKYPKLESEFVYGDYKVYDVRKMIAKSEQEIGKATAKYFFYSNIMNFFKTEITLANGEIRKRPL
IETNGETGEIVWDKGRDFATVRKVLSMPQVNIVKKTEVQTGGFSKESILPKRNSDKLIARKKDWDPKKYG
GFVSPTVAYSVLVVAKVEKGKSKKLKSVKELLGITIMERSSFEKNPIDFLEAKGYKEVKKDLIIKLPKYS
LFELENGRKRMLASARELQKGNELALPSKYVNFLYLASHYEKLKGSPEDNEQKQLFVEQHKHYLDEIIEQ
ISEFSKRVILADANLDKVLSAYNKHRDKPIREQAENIIHLFTLTNLGAPAAFKYFDTTIDRKQYRSTKEV
LDATLIHQSITGLYETRIDLSQLGGDEGADKRTADGSEFESPKKKRKV
12. monoABE8.1_bpNLS + Y147T_Q154S
(SEQ ID NO: 126)
MSEVEFSHEYWMRHALTLAKRARDEREVPVGAVLVLNNRVIGEGWNRAIGLHDPTAHAEIMALRQGGLVM
QNYRLIDATLYVTFEPCVMCAGAMIHSRIGRVVFGVRNAKTGAAGSLMDVLHYPGMNHRVEITEGILADE
CAALLCTFFRMPRSVFNAQKKAQSSTDSGGSSGGSSGSETPGTSESATPESSGGSSGGSDKKYSIGLAIG
TNSVGWAVITDEYKVPSKKFKVLGNTDRHSIKKNLIGALLFDSGETAEATRLKRTARRRYTRRKNRICYL
QEIFSNEMAKVDDSFFHRLEESFLVEEDKKHERHPIFGNIVDEVAYHEKYPTIYHLRKKLVDSTDKADLR
LIYLALAHMIKFRGHFLIEGDLNPDNSDVDKLFIQLVQTYNQLFEENPINASGVDAKAILSARLSKSRRL
ENLIAQLPGEKKNGLFGNLIALSLGLTPNFKSNFDLAEDAKLQLSKDTYDDDLDNLLAQIGDQYADLFLA
AKNLSDAILLSDILRVNTEITKAPLSASMIKRYDEHHQDLTLLKALVRQQLPEKYKEIFFDQSKNGYAGY
IDGGASQEEFYKFIKPILEKMDGTEELLVKLNREDLLRKQRTFDNGSIPHQIHLGELHAILRRQEDFYPF
LKDNREKIEKILTFRIPYYVGPLARGNSRFAWMTRKSEETITPWNFEEVVDKGASAQSFIERMTNFDKNL
PNEKVLPKHSLLYEYFTVYNELTKVKYVTEGMRKPAFLSGEQKKAIVDLLFKTNRKVTVKQLKEDYFKKI
ECFDSVEISGVEDRFNASLGTYHDLLKIIKDKDFLDNEENEDILEDIVLTLTLFEDREMIEERLKTYAHL
FDDKVMKQLKRRRYTGWGRLSRKLINGIRDKQSGKTILDFLKSDGFANRNFMQLIHDDSLTFKEDIQKAQ
VSGQGDSLHEHIANLAGSPAIKKGILQTVKVVDELVKVMGRHKPENIVIEMARENQTTQKGQKNSRERMK
RIEEGIKELGSQILKEHPVENTQLQNEKLYLYYLQNGRDMYVDQELDINRLSDYDVDHIVPQSFLKDDSI
DNKVLTRSDKNRGKSDNVPSEEVVKKMKNYWRQLLNAKLITQRKFDNLTKAERGGLSELDKAGFIKRQLV
ETRQITKHVAQILDSRMNTKYDENDKLIREVKVITLKSKLVSDFRKDFQFYKVREINNYHHAHDAYLNAV
VGTALIKKYPKLESEFVYGDYKVYDVRKMIAKSEQEIGKATAKYFFYSNIMNFFKTEITLANGEIRKRPL
IETNGETGEIVWDKGRDFATVRKVLSMPQVNIVKKTEVQTGGFSKESILPKRNSDKLIARKKDWDPKKYG
GFVSPTVAYSVLVVAKVEKGKSKKLKSVKELLGITIMERSSFEKNPIDFLEAKGYKEVKKDLIIKLPKYS
LFELENGRKRMLASARELQKGNELALPSKYVNFLYLASHYEKLKGSPEDNEQKQLFVEQHKHYLDEIIEQ
ISEFSKRVILADANLDKVLSAYNKHRDKPIREQAENIIHLFTLTNLGAPAAFKYFDTTIDRKQYRSTKEV
LDATLIHQSITGLYETRIDLSQLGGDEGADKRTADGSEFESPKKKRKV
13. monoABE8.1_bpNLS + H123Y123H_Y147R_Q154R_I76Y
(SEQ ID NO: 127)
MSEVEFSHEYWMRHALTLAKRARDEREVPVGAVLVLNNRVIGEGWNRAIGLHDPTAHAEIMALRQGGLVM
QNYRLYDATLYVTFEPCVMCAGAMIHSRIGRVVFGVRNAKTGAAGSLMDVLHHPGMNHRVEITEGILADE
CAALLCRFFRMPRRVFNAQKKAQSSTDSGGSSGGSSGSETPGTSESATPESSGGSSGGSDKKYSIGLAIG
TNSVGWAVITDEYKVPSKKFKVLGNTDRHSIKKNLIGALLFDSGETAEATRLKRTARRRYTRRKNRICYL
QEIFSNEMAKVDDSFFHRLEESFLVEEDKKHERHPIFGNIVDEVAYHEKYPTIYHLRKKLVDSTDKADLR
LIYLALAHMIKFRGHFLIEGDLNPDNSDVDKLFIQLVQTYNQLFEENPINASGVDAKAILSARLSKSRRL
ENLIAQLPGEKKNGLFGNLIALSLGLTPNFKSNFDLAEDAKLQLSKDTYDDDLDNLLAQIGDQYADLFLA
AKNLSDAILLSDILRVNTEITKAPLSASMIKRYDEHHQDLTLLKALVRQQLPEKYKEIFFDQSKNGYAGY
IDGGASQEEFYKFIKPILEKMDGTEELLVKLNREDLLRKQRTFDNGSIPHQIHLGELHAILRRQEDFYPF
LKDNREKIEKILTFRIPYYVGPLARGNSRFAWMTRKSEETITPWNFEEVVDKGASAQSFIERMTNFDKNL
PNEKVLPKHSLLYEYFTVYNELTKVKYVTEGMRKPAFLSGEQKKAIVDLLFKTNRKVTVKQLKEDYFKKI
ECFDSVEISGVEDRFNASLGTYHDLLKIIKDKDFLDNEENEDILEDIVLTLTLFEDREMIEERLKTYAHL
FDDKVMKQLKRRRYTGWGRLSRKLINGIRDKQSGKTILDFLKSDGFANRNFMQLIHDDSLTFKEDIQKAQ
VSGQGDSLHEHIANLAGSPAIKKGILQTVKVVDELVKVMGRHKPENIVIEMARENQTTQKGQKNSRERMK
RIEEGIKELGSQILKEHPVENTQLQNEKLYLYYLQNGRDMYVDQELDINRLSDYDVDHIVPQSFLKDDSI
DNKVLTRSDKNRGKSDNVPSEEVVKKMKNYWRQLLNAKLITQRKFDNLTKAERGGLSELDKAGFIKRQLV
ETRQITKHVAQILDSRMNTKYDENDKLIREVKVITLKSKLVSDFRKDFQFYKVREINNYHHAHDAYLNAV
VGTALIKKYPKLESEFVYGDYKVYDVRKMIAKSEQEIGKATAKYFFYSNIMNFFKTEITLANGEIRKRPL
IETNGETGEIVWDKGRDFATVRKVLSMPQVNIVKKTEVQTGGFSKESILPKRNSDKLIARKKDWDPKKYG
GFVSPTVAYSVLVVAKVEKGKSKKLKSVKELLGITIMERSSFEKNPIDFLEAKGYKEVKKDLIIKLPKYS
LFELENGRKRMLASARELQKGNELALPSKYVNFLYLASHYEKLKGSPEDNEQKQLFVEQHKHYLDEIIEQ
ISEFSKRVILADANLDKVLSAYNKHRDKPIREQAENIIHLFTLTNLGAPAAFKYFDTTIDRKQYRSTKEV
LDATLIHQSITGLYETRIDLSQLGGDEGADKRTADGSEFESPKKKRKV
14. monoABE8.1_bpNLS + V82S + Q154R
(SEQ ID NO: 128)
MSEVEFSHEYWMRHALTLAKRARDEREVPVGAVLVLNNRVIGEGWNRAIGLHDPTAHAEIMALRQGGLVM
QNYRLIDATLYSTFEPCVMCAGAMIHSRIGRVVFGVRNAKTGAAGSLMDVLHYPGMNHRVEITEGILADE
CAALLCYFFRMPRRVFNAQKKAQSSTDSGGSSGGSSGSETPGTSESATPESSGGSSGGSDKKYSIGLAIG
TNSVGWAVITDEYKVPSKKFKVLGNTDRHSIKKNLIGALLFDSGETAEATRLKRTARRRYTRRKNRICYL
QEIFSNEMAKVDDSFFHRLEESFLVEEDKKHERHPIFGNIVDEVAYHEKYPTIYHLRKKLVDSTDKADLR
LIYLALAHMIKFRGHFLIEGDLNPDNSDVDKLFIQLVQTYNQLFEENPINASGVDAKAILSARLSKSRRL
ENLIAQLPGEKKNGLFGNLIALSLGLTPNFKSNFDLAEDAKLQLSKDTYDDDLDNLLAQIGDQYADLFLA
AKNLSDAILLSDILRVNTEITKAPLSASMIKRYDEHHQDLTLLKALVRQQLPEKYKEIFFDQSKNGYAGY
IDGGASQEEFYKFIKPILEKMDGTEELLVKLNREDLLRKQRTFDNGSIPHQIHLGELHAILRRQEDFYPF
LKDNREKIEKILTFRIPYYVGPLARGNSRFAMMTRKSEETITPWNFEEVVDKGASAQSFIERMTNFDKNL
PNEKVLPKHSLLYEYFTVYNELTKVKYVTEGMRKPAFLSGEQKKAIVDLLFKTNRKVTVKQLKEDYFKKI
ECFDSVEISGVEDRFNASLGTYHDLLKIIKDKDFLDNEENEDILEDIVLTLTLFEDREMIEERLKTYAHL
FDDKVMKQLKRRRYTGWGRLSRKLINGIRDKQSGKTILDFLKSDGFANRNFMQLIHDDSLTFKEDIQKAQ
VSGQGDSLHEHIANLAGSPAIKKGILQTVKVVDELVKVMGRHKPENIVIEMARENQTTQKGQKNSRERMK
RIEEGIKELGSQILKEHPVENTQLQNEKLYLYYLQNGRDMYVDQELDINRLSDYDVDHIVPQSFLKDDSI
DNKVLTRSDKNRGKSDNVPSEEVVKKMKNYWRQLLNAKLITQRKFDNLTKAERGGLSELDKAGFIKRQLV
ETRQITKHVAQILDSRMNTKYDENDKLIREVKVITLKSKLVSDFRKDFQFYKVREINNYHHAHDAYLNAV
VGTALIKKYPKLESEFVYGDYKVYDVRKMIAKSEQEIGKATAKYFFYSNIMNFFKTEITLANGEIRKRPL
IETNGETGEIVWDKGRDFATVRKVLSMPQVNIVKKTEVQTGGFSKESILPKRNSDKLIARKKDWDPKKYG
GFVSPTVAYSVLVVAKVEKGKSKKLKSVKELLGITIMERSSFEKNPIDFLEAKGYKEVKKDLIIKLPKYS
LFELENGRKRMLASARELQKGNELALPSKYVNFLYLASHYEKLKGSPEDNEQKQLFVEQHKHYLDEIIEQ
ISEFSKRVILADANLDKVLSAYNKHRDKPIREQAENIIHLFTLTNLGAPAAFKYFDTTIDRKQYRSTKEV
LDATLIHQSITGLYETRIDLSQLGGDEGADKRTADGSEFESPKKKRKV

[0539] In some embodiments, the base editor is a fusion protein comprising a polynucleotide programmable nucleotide binding domain (e.g., Cas9-derived domain) fused to a nucleobase editing domain (e.g., all or a portion of a deaminase domain). In certain embodiments, the fusion proteins provided herein comprise one or more features that improve the base editing activity of the fusion proteins. For example, any of the fusion proteins provided herein may comprise a Cas9 domain that has reduced nuclease activity. In some embodiments, any of the fusion proteins provided herein may have a Cas9 domain that does not have nuclease activity (dCas9), or a Cas9 domain that cuts one strand of a duplexed DNA molecule, referred to as a Cas9 nickase (nCas9).

[0540] In some embodiments, the base editor further comprises a domain comprising all or a portion of a uracil glycosylase inhibitor (UGI). In some embodiments, the base editor comprises a domain comprising all or a portion of a uracil binding protein (UBP), such as a uracil DNA glycosylase (UDG). In some embodiments, the base editor comprises a domain comprising all or a portion of a nucleic acid polymerase. In some embodiments, a nucleic acid polymerase or portion thereof incorporated into a base editor is a translesion DNA polymerase.

[0541] In some embodiments, a domain of the base editor can comprise multiple domains. For example, the base editor comprising a polynucleotide programmable nucleotide binding domain derived from Cas9 can comprise an REC lobe and an NUC lobe corresponding to the REC lobe and NUC lobe of a wild-type or natural Cas9. In another example, the base editor can comprise one or more of a RuvCI domain, BH domain, REC1 domain, REC2 domain, RuvCII domain, L1 domain, HNH domain, L2 domain, RuvCIII domain, WED domain, TOPO domain or CTD domain. In some embodiments, one or more domains of the base editor comprise a mutation (e.g., substitution, insertion, deletion) relative to a wild type version of a polypeptide comprising the domain. For example, an HNH domain of a polynucleotide programmable DNA binding domain can comprise an H840A substitution. In another example, a RuvCI domain of a polynucleotide programmable DNA binding domain can comprise a D10A substitution.

[0542] Different domains (e.g., adjacent domains) of the base editor disclosed herein can be connected to each other with or without the use of one or more linker domains (e.g., an XTEN linker domain). In some embodiments, a linker domain can be a bond (e.g., covalent bond), chemical group, or a molecule linking two molecules or moieties, e.g., two domains of a fusion protein, such as, for example, a first domain (e.g., Cas9-derived domain) and a second domain (e.g., an adenosine deaminase domain). In some embodiments, a linker is a covalent bond (e.g., a carbon-carbon bond, disulfide bond, carbon-hetero atom bond, etc.). In certain embodiments, a linker is a carbon nitrogen bond of an amide linkage. In certain embodiments, a linker is a cyclic or acyclic, substituted or unsubstituted, branched or unbranched aliphatic or heteroaliphatic linker. In certain embodiments, a linker is polymeric (e.g., polyethylene, polyethylene glycol, polyamide, polyester, etc.). In certain embodiments, a linker comprises a monomer, dimer, or polymer of aminoalkanoic acid. In some embodiments, a linker comprises an aminoalkanoic acid (e.g., glycine, ethanoic acid, alanine, beta-alanine, 3-aminopropanoic acid, 4-aminobutanoic acid, 5-pentanoic acid, etc.). In some embodiments, a linker comprises a monomer, dimer, or polymer of aminohexanoic acid (Ahx). In certain embodiments, a linker is based on a carbocyclic moiety (e.g., cyclopentane, cyclohexane). In other embodiments, a linker comprises a polyethylene glycol moiety (PEG). In certain embodiments, a linker comprises an aryl or heteroaryl moiety. In certain embodiments, the linker is based on a phenyl ring. A linker can include functionalized moieties to facilitate attachment of a nucleophile (e.g., thiol, amino) from the peptide to the linker. Any electrophile can be used as part of the linker. Exemplary electrophiles include, but are not limited to, activated esters, activated amides, Michael acceptors, alkyl halides, aryl halides, acyl halides, and isothiocyanates. In some embodiments, a linker joins a gRNA binding domain of an RNA-programmable nuclease, including a Cas9 nuclease domain, and the catalytic domain of a nucleic acid editing protein. In some embodiments, a linker joins a dCas9 and a second domain (e.g., UGI, etc.).

[0543] Typically, a linker is positioned between, or flanked by, two groups, molecules, or other moieties and connected to each one via a covalent bond, thus connecting the two. In some embodiments, a linker is an amino acid or a plurality of amino acids (e.g., a peptide or protein). In some embodiments, a linker is an organic molecule, group, polymer, or chemical moiety. In some embodiments, a linker is 2-100 amino acids in length, for example, 2, 3, 4, 5, 6, 7, 8, 9, 10, 11, 12, 13, 14, 15, 16, 17, 18, 19, 20, 21, 22, 23, 24, 25, 26, 27, 28, 29, 30, 30-35, 35-40, 40-45, 45-50, 50-60, 60-70, 70-80, 80-90, 90-100, 100-150, or 150-200 amino acids in length. In some embodiments, the linker is about 3 to about 104 (e.g., 5, 6, 7, 8, 9, 10, 11, 12, 13, 14, 15, 16, 17, 18, 19, 20, 21, 22, 23, 24, 25, 26, 27, 28, 29, 30, 31, 32, 33, 34, 35, 36, 37, 38, 39, 40, 41, 42, 43, 44, 45, 46, 47, 48, 49, 50, 55, 60, 65, 70, 75, 80, 85, 90, 95, or 100) amino acids in length. Longer or shorter linkers are also contemplated. In some embodiments, a linker domain comprises the amino acid sequence SGSETPGTSESATPES (SEQ ID NO: 55), which can also be referred to as the XTEN linker. Any method for linking the fusion protein domains can be employed (e.g., ranging from very flexible linkers of the form (SGGS)n (SEQ ID NO: 129), (GGGS)n (SEQ ID NO: 130), (GGGGS)n (SEQ ID NO: 131), and (G)n, to more rigid linkers of the form (EAAAK)n (SEQ ID NO: 132), (GGS)n, SGSETPGTSESATPES (SEQ ID NO: 55) (see, e.g., Guilinger J P, Thompson D B, Liu D R. Fusion of catalytically inactive Cas9 to FokI nuclease improves the specificity of genome modification. Nat. Biotechnol. 2014; 32(6): 577-82; the entire contents are incorporated herein by reference), or (XP)ₙ motif, in order to achieve the optimal length for activity for the nucleobase editor. In some embodiments, n is 1, 2, 3, 4, 5, 6, 7, 8, 9, 10, 11, 12, 13, 14, or 15. In some embodiments, the linker comprises a (GGS)ₙ motif, wherein n is 1, 3, or 7 (SEQ ID NO: 133). In some embodiments, the Cas9 domain of the fusion proteins provided herein are fused via a linker comprising the amino acid sequence SGSETPGTSESATPES (SEQ ID NO: 55). In some embodiments, a linker comprises a plurality of proline residues and is 5-21, 5-14, 5-9, 5-7 amino acids in length, e.g., PAPAP (SEQ ID NO: 134), PAPAPA (SEQ ID NO: 135), PAPAPAP (SEQ ID NO: 136), PAPAPAPA (SEQ ID NO: 137), P(AP)₄ (SEQ ID NO: 138), P(AP)₇ (SEQ ID NO: 139), P(AP)₁₀ (SEQ ID NO: 140) (see, e.g., Tan J, Zhang F, Karcher D, Bock R. Engineering of high-precision base editors for site-specific single nucleotide replacement. Nat Commun. 2019 Jan. 25; 10(1):439; the entire contents are incorporated herein by reference). Such proline-rich linkers are also termed “rigid” linkers.

[0544] A fusion protein of the invention comprises a nucleic acid editing domain. In some embodiments, the deaminase is an adenosine deaminase. In some embodiments, the deaminase is a vertebrate deaminase. In some embodiments, the deaminase is an invertebrate deaminase. In some embodiments, the deaminase is a human, chimpanzee, gorilla, monkey, cow, dog, rat, or mouse deaminase. In some embodiments, the deaminase is a human deaminase. In some embodiments, the deaminase is a rat deaminase.

### Linkers

[0545] In certain embodiments, linkers may be used to link any of the peptides or peptide domains of the invention. The linker may be as simple as a covalent bond, or it may be a polymeric linker many atoms in length. In certain embodiments, the linker is a polypeptide or based on amino acids. In other embodiments, the linker is not peptide-like. In certain embodiments, the linker is a covalent bond (e.g., a carbon-carbon bond, disulfide bond, carbon-heteroatom bond, etc.). In certain embodiments, the linker is a carbon-nitrogen bond of an amide linkage. In certain embodiments, the linker is a cyclic or acyclic, substituted or unsubstituted, branched or unbranched aliphatic or heteroaliphatic linker. In certain embodiments, the linker is polymeric (e.g., polyethylene, polyethylene glycol, polyamide, polyester, etc.). In certain embodiments, the linker comprises a monomer, dimer, or polymer of aminoalkanoic acid. In certain embodiments, the linker comprises an aminoalkanoic acid (e.g., glycine, ethanoic acid, alanine, beta-alanine, 3-aminopropanoic acid, 4-aminobutanoic acid, 5-pentanoic acid, etc.). In certain embodiments, the linker comprises a monomer, dimer, or polymer of aminohexanoic acid (Ahx). In certain embodiments, the linker is based on a carbocyclic moiety (e.g., cyclopentane, cyclohexane). In other embodiments, the linker comprises a polyethylene glycol moiety (PEG). In other embodiments, the linker comprises amino acids. In certain embodiments, the linker comprises a peptide. In certain embodiments, the linker comprises an aryl or heteroaryl moiety. In certain embodiments, the linker is based on a phenyl ring. The linker may include functionalized moieties to facilitate attachment of a nucleophile (e.g., thiol, amino) from the peptide to the linker. Any electrophile may be used as part of the linker. Exemplary electrophiles include, but are not limited to, activated esters, activated amides, Michael acceptors, alkyl halides, aryl halides, acyl halides, and isothiocyanates.

[0546] In some embodiments, the linker is an amino acid or a plurality of amino acids (e.g., a peptide or protein). In some embodiments, the linker is a bond (e.g., a covalent bond), an organic molecule, group, polymer, or chemical moiety. In some embodiments, the linker is about 3 to about 104 (e.g., 5, 6, 7, 8, 9, 10, 11, 12, 13, 14, 15, 16, 17, 18, 19, 20, 21, 22, 23, 24, 25, 26, 27, 28, 29, 30, 31, 32, 33, 34, 35, 36, 37, 38, 39, 40, 41, 42, 43, 44, 45, 46, 47, 48, 49, 50, 55, 60, 65, 70, 75, 80, 85, 90, 95, or 100) amino acids in length.

[0547] In some embodiments, the adenosine deaminase and the napDNAbp are fused via a linker that is 4, 16, 32, or 104 amino acids in length. In some embodiments, the linker is about 3 to about 104 amino acids in length. In some embodiments, any of the fusion proteins provided herein, comprise an adenosine deaminase and a Cas9 domain that are fused to each other via a linker. Various linker lengths and flexibilities between the deaminase domain (e.g., an engineered ecTadA) and the Cas9 domain can be employed (e.g., ranging from very flexible linkers of the form (GGGS)ₙ (SEQ ID NO: 130), (GGGGS)ₙ (SEQ ID NO: 131), and (G)ₙ to more rigid linkers of the form (EAAAK)ₙ (SEQ ID NO: 132), (SGGS)ₙ (SEQ ID NO: 129), SGSETPGTSESATPES (SEQ ID NO: 55) (see, e.g., Guilinger J P, Thompson D B, Liu D R. Fusion of catalytically inactive Cas9 to FokI nuclease improves the specificity of genome modification. Nat. Biotechnol. 2014; 32(6): 577-82; the entire contents are incorporated herein by reference) and (XP)ₙ) in order to achieve the optimal length for activity for the nucleobase editor. In some embodiments, n is 1, 2, 3, 4, 5, 6, 7, 8, 9, 10, 11, 12, 13, 14, or 15. In some embodiments, the linker comprises a (GGS)ₙ motif, wherein n is 1, 3, or 7 (SEQ ID NO: 133). In some embodiments, the adenosine deaminase and the Cas9 domain of any of the fusion proteins provided herein are fused via a linker (e.g., an XTEN linker) comprising the amino acid sequence SGSETPGTSESATPES (SEQ ID NO: 55).

Cas9 Complexes with Guide RNAs

[0548] Some aspects of this disclosure provide complexes comprising any of the fusion proteins provided herein, and a guide RNA (e.g., a guide that targets a SCD mutation). Any method for linking the fusion protein domains can be employed (e.g., ranging from very flexible linkers of the form (GGGS)ₙ (SEQ ID NO: 130), (GGGGS)ₙ (SEQ ID NO: 131), and (G)ₙ to more rigid linkers of the form (EAAAK)ₙ (SEQ ID NO: 132), (SGGS)ₙ (SEQ ID NO: 129), SGSETPGTSESATPES (SEQ ID NO: 55) (see, e.g., Guilinger J P, Thompson D B, Liu D R. Fusion of catalytically inactive Cas9 to FokI nuclease improves the specificity of genome modification. Nat. Biotechnol. 2014; 32(6): 577-82; the entire contents are incorporated herein by reference) and (XP)ₙ) in order to achieve the optimal length for activity for the nucleobase editor. In some embodiments, n is 1, 2, 3, 4, 5, 6, 7, 8, 9, 10, 11, 12, 13, 14, or 15. In some embodiments, the linker comprises a (GGS)ₙ motif, wherein n is 1, 3, or 7 (SEQ ID NO: 133). In some embodiments, the Cas9 domain of the fusion proteins provided herein are fused via a linker comprising the amino acid sequence SGSETPGTSESATPES (SEQ ID NO: 55).

[0549] In some embodiments, the guide nucleic acid (e.g., guide RNA) is from 15-100 nucleotides long and comprises a sequence of at least 10 contiguous nucleotides that is complementary to a target sequence. In some embodiments, the guide RNA is 15, 16, 17, 18, 19, 20, 21, 22, 23, 24, 25, 26, 27, 28, 29, 30, 31, 32, 33, 34, 35, 36, 37, 38, 39, 40, 41, 42, 43, 44, 45, 46, 47, 48, 49, or 50 nucleotides long. In some embodiments, the guide RNA comprises a sequence of 15, 16, 17, 18, 19, 20, 21, 22, 23, 24, 25, 26, 27, 28, 29, 30, 31, 32, 33, 34, 35, 36, 37, 38, 39, or 40 contiguous nucleotides that is complementary to a target sequence. In some embodiments, the target sequence is a DNA sequence. In some embodiments, the target sequence is a sequence in the genome of a bacteria, yeast, fungi, insect, plant, or animal. In some embodiments, the target sequence is a sequence in the genome of a human. In some embodiments, the 3′ end of the target sequence is immediately adjacent to a canonical PAM sequence (NGG). In some embodiments, the 3′ end of the target sequence is immediately adjacent to a non-canonical PAM sequence (e.g., a sequence listed in Table 1 or 5′NAA-3′). In some embodiments, the guide nucleic acid (e.g., guide RNA) is complementary to a sequence associated with sickle cell disease (SCD).

[0550] Some aspects of this disclosure provide methods of using the fusion proteins, or complexes provided herein. For example, some aspects of this disclosure provide methods comprising contacting a DNA molecule with any of the fusion proteins provided herein, and with at least one guide RNA, wherein the guide RNA is about 15-100 nucleotides long and comprises a sequence of at least 10 contiguous nucleotides that is complementary to a target sequence. In some embodiments, the 3′ end of the target sequence is immediately adjacent to an AGC, GAG, TTT, GTG, or CAA sequence. In some embodiments, the 3′ end of the target sequence is immediately adjacent to an NGA, NGCG, NGN, NNGRRT, NNNRRT, NGCG, NGCN, NGTN, NGTN, NGTN, or 5′ (TTTV) sequence.

[0551] It will be understood that the numbering of the specific positions or residues in the respective sequences depends on the particular protein and numbering scheme used. Numbering might be different, e.g., in precursors of a mature protein and the mature protein itself, and differences in sequences from species to species may affect numbering. One of skill in the art will be able to identify the respective residue in any homologous protein and in the respective encoding nucleic acid by methods well known in the art, e.g., by sequence alignment and determination of homologous residues.

[0552] It will be apparent to those of skill in the art that in order to target any of the fusion proteins disclosed herein, to a target site, e.g., a site comprising a mutation to be edited, it is typically necessary to co-express the fusion protein together with a guide RNA. As explained in more detail elsewhere herein, a guide RNA typically comprises a tracrRNA framework allowing for Cas9 binding, and a guide sequence, which confers sequence specificity to the Cas9:nucleic acid editing enzyme/domain fusion protein. Alternatively, the guide RNA and tracrRNA may be provided separately, as two nucleic acid molecules. In some embodiments, the guide RNA comprises a structure, wherein the guide sequence comprises a sequence that is complementary to the target sequence. The guide sequence is typically 20 nucleotides long. The sequences of suitable guide RNAs for targeting Cas9:nucleic acid editing enzyme/domain fusion proteins to specific genomic target sites will be apparent to those of skill in the art based on the instant disclosure. Such suitable guide RNA sequences typically comprise guide sequences that are complementary to a nucleic sequence within 50 nucleotides upstream or downstream of the target nucleotide to be edited. Some exemplary guide RNA sequences suitable for targeting any of the provided fusion proteins to specific target sequences are provided herein.

Cas12 Complexes with Guide RNAs

[0553] Some aspects of this disclosure provide complexes comprising any of the fusion proteins provided herein, and a guide RNA (e.g., a guide that targets a target polynucleotide for editing).

[0554] In some embodiments, the guide nucleic acid (e.g., guide RNA) is from 15-100 nucleotides long and comprises a sequence of at least 10 contiguous nucleotides that is complementary to a target sequence. In some embodiments, the guide RNA is 15, 16, 17, 18, 19, 20, 21, 22, 23, 24, 25, 26, 27, 28, 29, 30, 31, 32, 33, 34, 35, 36, 37, 38, 39, 40, 41, 42, 43, 44, 45, 46, 47, 48, 49, or 50 nucleotides long. In some embodiments, the guide RNA comprises a sequence of 15, 16, 17, 18, 19, 20, 21, 22, 23, 24, 25, 26, 27, 28, 29, 30, 31, 32, 33, 34, 35, 36, 37, 38, 39, or 40 contiguous nucleotides that is complementary to a target sequence. In some embodiments, the target sequence is a DNA sequence. In some embodiments, the target sequence is a sequence in the genome of a bacteria, yeast, fungi, insect, plant, or animal. In some embodiments, the target sequence is a sequence in the genome of a human. In some embodiments, the 3′ end of the target sequence is immediately adjacent to a canonical PAM sequence. In some embodiments, the 3′ end of the target sequence is immediately adjacent to a non-canonical PAM sequence.

[0555] Some aspects of this disclosure provide methods of using the fusion proteins, or complexes provided herein. For example, some aspects of this disclosure provide methods comprising contacting a DNA molecule with any of the fusion proteins provided herein, and with at least one guide RNA, wherein the guide RNA is about 15-100 nucleotides long and comprises a sequence of at least 10 contiguous nucleotides that is complementary to a target sequence. In some embodiments, the 3′ end of the target sequence is immediately adjacent to an e.g., TTN, DTTN, GTTN, ATTN, ATTC, DTTNT, WTTN, HATY, TTTN, TTTV, TTTC, TG, RTR, or YTN PAM site.

[0556] It will be understood that the numbering of the specific positions or residues in the respective sequences depends on the particular protein and numbering scheme used. Numbering might be different, e.g., in precursors of a mature protein and the mature protein itself, and differences in sequences from species to species may affect numbering. One of skill in the art will be able to identify the respective residue in any homologous protein and in the respective encoding nucleic acid by methods well known in the art, e.g., by sequence alignment and determination of homologous residues.

[0557] It will be apparent to those of skill in the art that in order to target any of the fusion proteins disclosed herein, to a target site, e.g., a site comprising a mutation to be edited, it is typically necessary to co-express the fusion protein together with a guide RNA. As explained in more detail elsewhere herein, a guide RNA typically comprises a tracrRNA framework allowing for Cas12 binding, and a guide sequence, which confers sequence specificity to the Cas12:nucleic acid editing enzyme/domain fusion protein. Alternatively, the guide RNA and tracrRNA may be provided separately, as two nucleic acid molecules. In some embodiments, the guide RNA comprises a structure, wherein the guide sequence comprises a sequence that is complementary to the target sequence. The guide sequence is typically 20 nucleotides long. The sequences of suitable guide RNAs for targeting Cas12:nucleic acid editing enzyme/domain fusion proteins to specific genomic target sites will be apparent to those of skill in the art based on the instant disclosure. Such suitable guide RNA sequences typically comprise guide sequences that are complementary to a nucleic sequence within 50 nucleotides upstream or downstream of the target nucleotide to be edited. Some exemplary guide RNA sequences suitable for targeting any of the provided fusion proteins to specific target sequences are provided herein.

[0558] The domains of the base editor disclosed herein can be arranged in any order as long as the deaminase domain is internalized in the Cas12 protein. Non-limiting examples of a base editor comprising a fusion protein comprising e.g., a Cas12 domain and a deaminase domain can be arranged as follows:

NH2-[Cas12 domain]-Linker1-[ABE8]-Linker2-[Cas12 domain]-COOH;
NH2-[Cas12 domain]-Linker1-[ABE8]-[Cas12 domain]-COOH;
NH2-[Cas12 domain]-[ABE8]-Linker2-[Cas12 domain]-COOH;
NH2-[Cas12 domain]-[ABE8]-[Cas12 domain]-COOH;
NH2-[Cas12 domain]-Linker1-[ABE8]-Linker2-[Cas12 domain]-[inosine BER inhibitor]-COOH;
NH2-[Cas12 domain]-Linker1-[ABE8]-[Cas12 domain]-[inosine BER inhibitor]-COOH;
NH2-[Cas12 domain]-[ABE8]-Linker2-[Cas12 domain]-[inosine BER inhibitor]-COOH;
NH2-[Cas12 domain]-[ABE8]-[Cas12 domain]-[inosine BER inhibitor]-COOH;
NH2-[inosine BER inhibitor]-[Cas12 domain]-Linker1-[ABE8]-Linker2-[Cas12 domain]-COOH;
NH2-[inosine BER inhibitor]-[Cas12 domain]-Linker1-[ABE8]-[Cas12 domain]-COOH;
NH2-[inosine BER inhibitor]-[Cas12 domain]-[ABE8]-Linker2-[Cas12 domain]-COOH;
NH2-[inosine BER inhibitor]NH2-[Cas12 domain]-[ABE8]-[Cas12 domain]-COOH;

[0559] Additionally, in some cases, a Gam protein can be fused to an N terminus of a base editor. In some cases, a Gam protein can be fused to a C terminus of a base editor. The Gam protein of bacteriophage Mu can bind to the ends of double strand breaks (DSBs) and protect them from degradation. In some embodiments, using Gam to bind the free ends of DSB can reduce indel formation during the process of base editing. In some embodiments, 174-residue Gam protein is fused to the N terminus of the base editors. See. Komor, A. C., et al., “Improved base excision repair inhibition and bacteriophage Mu Gam protein yields C:G-to-T:A base editors with higher efficiency and product purity” Science Advances 3:eaao4774 (2017). In some cases, a mutation or mutations can change the length of a base editor domain relative to a wild type domain. For example, a deletion of at least one amino acid in at least one domain can reduce the length of the base editor. In another case, a mutation or mutations do not change the length of a domain relative to a wild type domain. For example, substitution(s) in any domain does/do not change the length of the base editor

[0560] In some embodiments, the base editing fusion proteins provided herein need to be positioned at a precise location, for example, where a target base is placed within a defined region (e.g., a “deamination window”). In some cases, a target can be within a 4-base region. In some cases, such a defined target region can be approximately 15 bases upstream of the PAM. See Komor, A. C., et al., “Programmable editing of a target base in genomic DNA without double-stranded DNA cleavage” Nature 533, 420-424 (2016); Gaudelli, N. M., et al., “Programmable base editing of A•T to G•C in genomic DNA without DNA cleavage” Nature 551, 464-471 (2017); and Komor, A. C., et al., “Improved base excision repair inhibition and bacteriophage Mu Gam protein yields C:G-to-T:A base editors with higher efficiency and product purity” Science Advances 3:eaao4774 (2017), the entire contents of which are hereby incorporated by reference.

[0561] A defined target region can be a deamination window. A deamination window can be the defined region in which a base editor acts upon and deaminates a target nucleotide. In some embodiments, the deamination window is within a 2, 3, 4, 5, 6, 7, 8, 9, or 10 base regions. In some embodiments, the deamination window is 5, 6, 7, 8, 9, 10, 11, 12, 13, 14, 15, 16, 17, 18, 19, 20, 21, 22, 23, 24, or 25 bases upstream of the PAM.

[0562] The base editors of the present disclosure can comprise any domain, feature or amino acid sequence which facilitates the editing of a target polynucleotide sequence. For example, in some embodiments, the base editor comprises a nuclear localization sequence (NLS). In some embodiments, an NLS of the base editor is localized between a deaminase domain and a napDNAbp domain. In some embodiments, an NLS of the base editor is localized C-terminal to a napDNAbp domain.

[0563] Protein domains included in the fusion protein can be a heterologous functional domain. Non-limiting examples of protein domains which can be included in the fusion protein include a deaminase domain (e.g., adenosine deaminase), a uracil glycosylase inhibitor (UGI) domain, epitope tags, and reporter gene sequences. Protein domains can be a heterologous functional domain, for example, having one or more of the following activities: transcriptional activation activity, transcriptional repression activity, transcription release factor activity, gene silencing activity, chromatin modifying activity, epigenetic modifying activity, histone modification activity, RNA cleavage activity, and nucleic acid binding activity. Such heterologous functional domains can confer a function activity, such as modification of a target polypeptide associated with target DNA (e.g., a histone, a DNA binding protein, etc.), leading to, for example, histone methylation, histone acetylation, histone ubiquitination, and the like. Other functions and/or activities conferred can include transposase activity, integrase activity, recombinase activity, ligase activity, ubiquitin ligase activity, deubiquitinating activity, adenylation activity, deadenylation activity, SUMOylation activity, deSUMOylation activity, or any combination of the above.

[0564] A domain may be detected or labeled with an epitope tag, a reporter protein, other binding domains. Non-limiting examples of epitope tags include histidine (His) tags, V5 tags, FLAG tags, influenza hemagglutinin (HA) tags, Myc tags, VSV-G tags, and thioredoxin (Trx) tags. Examples of reporter genes include, but are not limited to, glutathione-5-transferase (GST), horseradish peroxidase (HRP), chloramphenicol acetyltransferase (CAT) beta-galactosidase, beta-glucuronidase, luciferase, green fluorescent protein (GFP), HcRed, DsRed, cyan fluorescent protein (CFP), yellow fluorescent protein (YFP), and autofluorescent proteins including blue fluorescent protein (BFP). Additional protein sequences can include amino acid sequences that bind DNA molecules or bind other cellular molecules, including but not limited to maltose binding protein (MBP), S-tag, Lex A DNA binding domain (DBD) fusions, GAL4 DNA binding domain fusions, and herpes simplex virus (HSV) BP16 protein fusions.

[0565] In some embodiments, BhCas12b guide polynucleotide has the following sequence (where the T's are replaced by uridines (U's) in the actual gRNA):

BhCas12b sgRNA scaffold (underlined) + 20 nt to 23
nt guide sequence (denoted by Nₙ)
(SEQ ID NO: 141)
5′GTTCTGTCTTTTGGTCAGGACAACCGTCTAGCTATAAGTGCTGCAGGG
TGTGAGAAACTCCTATTGCTGGACGATGTCTCTTACGAGGCATTAGCACN
NNNNNNNNNNNNNNNNNNN-3′

[0566] In some embodiments, BvCas12b and AaCas12b guide polynucleotides have the following sequences (where the T's are replaced by uridines (U's) in the actual gRNA):

BvCas12b sgRNA scaffold (underlined) + 20 nt to 23
nt guide sequence (denoted by Nₙ)
(SEQ ID NO: 142)
5′GACCTATAGGGTCAATGAATCTGTGCGTGTGCCATAAGTAATTAAAAA
TTACCCACCACAGGAGCACCTGAAAACAGGTGCTTGGCACNNNNNNNNNN
NNNNNNNNNN-3′
AaCas12b sgRNA scaffold (underlined) + 20 nt to 23
nt guide sequence (denoted by Nₙ)
(SEQ ID NO: 143)
5′GTCTAAAGGACAGAATTTTTCAACGGGTGTGCCAATGGCCACTTTCCA
GGTGGCAAAGCCCGTTGAACTTCTCAAAAAGAACGATCTGAGAAGTGGCA
CNNNNNNNNNNNNNNNNNNNN-3′

### Methods of Using Fusion Proteins Comprising Adenosine Deaminase Variant and a Cas9 Domain

[0567] Some aspects of this disclosure provide methods of using the fusion proteins, or complexes provided herein. For example, some aspects of this disclosure provide methods comprising contacting a DNA molecule encoding a mutant form of HBG with any of the fusion proteins provided herein, and with at least one guide RNA, wherein the guide RNA is about 15-100 nucleotides long and comprises a sequence of at least 10 contiguous nucleotides that is complementary to a target sequence. In some embodiments, the 3′ end of the target sequence is immediately adjacent to a canonical PAM sequence (NGG). In some embodiments, the 3′ end of the target sequence is not immediately adjacent to a canonical PAM sequence (NGG). In some embodiments, the 3′ end of the target sequence is immediately adjacent to an AGC, GAG, TTT, GTG, or CAA sequence. In some embodiments, the 3′ end of the target sequence is immediately adjacent to an NGA, NGCG, NGN, NNGRRT, NNNRRT, NGCG, NGCN, NGTN, NGTN, NGTN, or 5′ (TTTV) sequence.

[0568] It will be understood that the numbering of the specific positions or residues in the respective sequences depends on the particular protein and numbering scheme used. Numbering might be different, e.g., in precursors of a mature protein and the mature protein itself, and differences in sequences from species to species may affect numbering. One of skill in the art will be able to identify the respective residue in any homologous protein and in the respective encoding nucleic acid by methods well known in the art, e.g., by sequence alignment and determination of homologous residues.

[0569] It will be apparent to those of skill in the art that in order to target any of the fusion proteins comprising a Cas9 domain and an adenosine deaminase variant (e.g., ABE8), as disclosed herein, to a target site, e.g., a site comprising a mutation to be edited, it is typically necessary to co-express the fusion protein together with a guide RNA, e.g., an sgRNA. As explained in more detail elsewhere herein, a guide RNA typically comprises a tracrRNA framework allowing for Cas9 binding, and a guide sequence, which confers sequence specificity to the Cas9:nucleic acid editing enzyme/domain fusion protein. Alternatively, the guide RNA and tracrRNA may be provided separately, as two nucleic acid molecules. In some embodiments, the guide RNA comprises a structure, wherein the guide sequence comprises a sequence that is complementary to the target sequence. The guide sequence is typically 20 nucleotides long. The sequences of suitable guide RNAs for targeting Cas9:nucleic acid editing enzyme/domain fusion proteins to specific genomic target sites will be apparent to those of skill in the art based on the instant disclosure. Such suitable guide RNA sequences typically comprise guide sequences that are complementary to a nucleic sequence within 50 nucleotides upstream or downstream of the target nucleotide to be edited. Some exemplary guide RNA sequences suitable for targeting any of the provided fusion proteins to specific target sequences are provided herein.

### Base Editor Efficiency

[0570] CRISPR-Cas9 nucleases have been widely used to mediate targeted genome editing. In most genome editing applications, Cas9 forms a complex with a guide polynucleotide (e.g., single guide RNA (sgRNA)) and induces a double-stranded DNA break (DSB) at the target site specified by the sgRNA sequence. Cells primarily respond to this DSB through the non-homologous end-joining (NHEJ) repair pathway, which results in stochastic insertions or deletions (indels) that can cause frameshift mutations that disrupt the gene. In the presence of a donor DNA template with a high degree of homology to the sequences flanking the DSB, gene correction can be achieved through an alternative pathway known as homology directed repair (HDR). Unfortunately, under most non-perturbative conditions, HDR is inefficient, dependent on cell state and cell type, and dominated by a larger frequency of indels. As most of the known genetic variations associated with human disease are point mutations, methods that can more efficiently and cleanly make precise point mutations are needed. Base editing systems as provided herein provide a new way to provide genome editing without generating double-strand DNA breaks, without requiring a donor DNA template, and without inducing an excess of stochastic insertions and deletions.

[0571] The fusion proteins of the invention advantageously modify a specific nucleotide base encoding a H comprising a mutation without generating a significant proportion of indels. An “indel,” as used herein, refers to the insertion or deletion of a nucleotide base within a nucleic acid. Such insertions or deletions can lead to frame shift mutations within a coding region of a gene. In some embodiments, it is desirable to generate base editors that efficiently modify (e.g. mutate) a specific nucleotide within a nucleic acid, without generating a large number of insertions or deletions (i.e., indels) in the nucleic acid. In certain embodiments, any of the base editors provided herein are capable of generating a greater proportion of intended modifications (e.g., mutations) versus indels.

[0572] In some embodiments, any of base editor systems provided herein result in less than 50%, less than 40%, less than 30%, less than 20%, less than 19%, less than 18%, less than 17%, less than 16%, less than 15%, less than 14%, less than 13%, less than 12%, less than 11%, less than 10%, less than 9%, less than 8%, less than 7%, less than 6%, less than 5%, less than 4%, less than 3%, less than 2%, less than 1%, less than 0.9%, less than 0.8%, less than 0.7%, less than 0.6%, less than 0.5%, less than 0.4%, less than 0.3%, less than 0.2%, less than 0.1%, less than 0.09%, less than 0.08%, less than 0.07%, less than 0.06%, less than 0.05%, less than 0.04%, less than 0.03%, less than 0.02%, or less than 0.01% indel formation in the target polynucleotide sequence.

[0573] Some aspects of the disclosure are based on the recognition that any of the base editors provided herein are capable of efficiently generating an intended mutation, such as a point mutation, in a nucleic acid (e.g., a nucleic acid within a genome of a subject) without generating a significant number of unintended mutations, such as unintended point mutations. In some embodiments, any of the base editors provided herein are capable of generating at least 0.01% of intended mutations (i.e. at least 0.01% base editing efficiency). In some embodiments, any of the base editors provided herein are capable of generating at least 0.01%, 1%, 2%, 3%, 4%, 5%, 10%, 15%, 20%, 25%, 30%, 40%, 45%, 50%, 60%, 70%, 80%, 90%, 95%, or 99% of intended mutations.

[0574] In some embodiments, the base editors provided herein are capable of generating a ratio of intended mutations to indels that is greater than 1:1. In some embodiments, the base editors provided herein are capable of generating a ratio of intended mutations to indels that is at least 1.5:1, at least 2:1, at least 2.5:1, at least 3:1, at least 3.5:1, at least 4:1, at least 4.5:1, at least 5:1, at least 5.5:1, at least 6:1, at least 6.5:1, at least 7:1, at least 7.5:1, at least 8:1, at least 10:1, at least 12:1, at least 15:1, at least 20:1, at least 25:1, at least 30:1, at least 40:1, at least 50:1, at least 100:1, at least 200:1, at least 300:1, at least 400:1, at least 500:1, at least 600:1, at least 700:1, at least 800:1, at least 900:1, or at least 1000:1, or more.

[0575] The number of intended mutations and indels can be determined using any suitable method, for example, as described in International PCT Application Nos. PCT/2017/045381 (WO2018/027078) and PCT/US2016/058344 (WO2017/070632); Komor, A. C., et al., “Programmable editing of a target base in genomic DNA without double-stranded DNA cleavage” Nature 533, 420-424 (2016); Gaudelli, N. M., et al., “Programmable base editing of A•T to G•C in genomic DNA without DNA cleavage” Nature 551, 464-471 (2017); and Komor, A C., et al., “Improved base excision repair inhibition and bacteriophage Mu Gam protein yields C:G-to-T:A base editors with higher efficiency and product purity” Science Advances 3:eaao4774 (2017); the entire contents of which are hereby incorporated by reference.

[0576] In some embodiments, to calculate indel frequencies, sequencing reads are scanned for exact matches to two 10-bp sequences that flank both sides of a window in which indels can occur. If no exact matches are located, the read is excluded from analysis. If the length of this indel window exactly matches the reference sequence the read is classified as not containing an indel. If the indel window is two or more bases longer or shorter than the reference sequence, then the sequencing read is classified as an insertion or deletion, respectively. In some embodiments, the base editors provided herein can limit formation of indels in a region of a nucleic acid. In some embodiments, the region is at a nucleotide targeted by a base editor or a region within 2, 3, 4, 5, 6, 7, 8, 9, or 10 nucleotides of a nucleotide targeted by a base editor.

[0577] The number of indels formed at a target nucleotide region can depend on the amount of time a nucleic acid (e.g., a nucleic acid within the genome of a cell) is exposed to a base editor. In some embodiments, the number or proportion of indels is determined after at least 1 hour, at least 2 hours, at least 6 hours, at least 12 hours, at least 24 hours, at least 36 hours, at least 48 hours, at least 3 days, at least 4 days, at least 5 days, at least 7 days, at least 10 days, or at least 14 days of exposing the target nucleotide sequence (e.g., a nucleic acid within the genome of a cell) to a base editor. It should be appreciated that the characteristics of the base editors as described herein can be applied to any of the fusion proteins, or methods of using the fusion proteins provided herein.

[0578] In some embodiments, the base editors provided herein are capable of limiting formation of indels in a region of a nucleic acid. In some embodiments, the region is at a nucleotide targeted by a base editor or a region within 2, 3, 4, 5, 6, 7, 8, 9, or 10 nucleotides of a nucleotide targeted by a base editor. In some embodiments, any of the base editors provided herein are capable of limiting the formation of indels at a region of a nucleic acid to less than 1%, less than 1.5%, less than 2%, less than 2.5%, less than 3%, less than 3.5%, less than 4%, less than 4.5%, less than 5%, less than 6%, less than 7%, less than 8%, less than 9%, less than 10%, less than 12%, less than 15%, or less than 20%. The number of indels formed at a nucleic acid region may depend on the amount of time a nucleic acid (e.g., a nucleic acid within the genome of a cell) is exposed to a base editor. In some embodiments, any number or proportion of indels is determined after at least 1 hour, at least 2 hours, at least 6 hours, at least 12 hours, at least 24 hours, at least 36 hours, at least 48 hours, at least 3 days, at least 4 days, at least 5 days, at least 7 days, at least 10 days, or at least 14 days of exposing a nucleic acid (e.g., a nucleic acid within the genome of a cell) to a base editor.

[0579] Some aspects of the disclosure are based on the recognition that any of the base editors provided herein are capable of efficiently generating an intended mutation in a nucleic acid (e.g. a nucleic acid within a genome of a subject) without generating a significant number of unintended mutations. In some embodiments, an intended mutation is a mutation that is generated by a specific base editor bound to a gRNA, specifically designed to alter or correct a

[0580] HBG mutation. In some embodiments, any of the base editors provided herein are capable of generating a ratio of intended mutations to unintended mutations (e.g., intended mutations:unintended mutations) that is greater than 1:1. In some embodiments, any of the base editors provided herein are capable of generating a ratio of intended mutations to unintended mutations that is at least 1.5:1, at least 2:1, at least 2.5:1, at least 3:1, at least 3.5:1, at least 4:1, at least 4.5:1, at least 5:1, at least 5.5:1, at least 6:1, at least 6.5:1, at least 7:1, at least 7.5:1, at least 8:1, at least 10:1, at least 12:1, at least 15:1, at least 20:1, at least 25:1, at least 30:1, at least 40:1, at least 50:1, at least 100:1, at least 150:1, at least 200:1, at least 250:1, at least 500:1, or at least 1000:1, or more. It should be appreciated that the characteristics of the base editors described herein may be applied to any of the fusion proteins, or methods of using the fusion proteins provided herein.

### Multiplex Editing

[0581] In some embodiments, the base editor system provided herein is capable of multiplex editing of a plurality of nucleobase pairs in one or more genes. In some embodiments, the plurality of nucleobase pairs is located in the same gene. In some embodiments, the plurality of nucleobase pairs is located in one or more gene, wherein at least one gene is located in a different locus. In some embodiments, the multiplex editing can comprise one or more guide polynucleotides. In some embodiments, the multiplex editing can comprise one or more base editor system. In some embodiments, the multiplex editing can comprise one or more base editor systems with a single guide polynucleotide. In some embodiments, the multiplex editing can comprise one or more base editor systems with a plurality of guide polynucleotides. In some embodiments, the multiplex editing can comprise one or more guide polynucleotide with a single base editor system. In some embodiments, the multiplex editing can comprise at least one guide polynucleotide that does not require a PAM sequence to target binding to a target polynucleotide sequence. In some embodiments, the multiplex editing can comprise at least one guide polynucleotide that requires a PAM sequence to target binding to a target polynucleotide sequence. In some embodiments, the multiplex editing can comprise a mix of at least one guide polynucleotide that does not require a PAM sequence to target binding to a target polynucleotide sequence and at least one guide polynucleotide that require a PAM sequence to target binding to a target polynucleotide sequence. It should be appreciated that the characteristics of the multiplex editing using any of the base editors as described herein can be applied to any of combination of the methods of using any of the base editor provided herein. It should also be appreciated that the multiplex editing using any of the base editors as described herein can comprise a sequential editing of a plurality of nucleobase pairs.

[0582] In some embodiments, the plurality of nucleobase pairs is in one more genes. In some embodiments, the plurality of nucleobase pairs is in the same gene. In some embodiments, at least one gene in the one more genes is located in a different locus.

[0583] In some embodiments, the editing is editing of the plurality of nucleobase pairs in at least one protein coding region. In some embodiments, the editing is editing of the plurality of nucleobase pairs in at least one protein non-coding region. In some embodiments, the editing is editing of the plurality of nucleobase pairs in at least one protein coding region and at least one protein non-coding region.

[0584] In some embodiments, the editing is in conjunction with one or more guide polynucleotides. In some embodiments, the base editor system can comprise one or more base editor system. In some embodiments, the base editor system can comprise one or more base editor systems in conjunction with a single guide polynucleotide. In some embodiments, the base editor system can comprise one or more base editor system in conjunction with a plurality of guide polynucleotides. In some embodiments, the editing is in conjunction with one or more guide polynucleotide with a single base editor system. In some embodiments, the editing is in conjunction with at least one guide polynucleotide that does not require a PAM sequence to target binding to a target polynucleotide sequence. In some embodiments, the editing is in conjunction with at least one guide polynucleotide that require a PAM sequence to target binding to a target polynucleotide sequence. In some embodiments, the editing is in conjunction with a mix of at least one guide polynucleotide that does not require a PAM sequence to target binding to a target polynucleotide sequence and at least one guide polynucleotide that require a PAM sequence to target binding to a target polynucleotide sequence. It should be appreciated that the characteristics of the multiplex editing using any of the base editors as described herein can be applied to any of combination of the methods of using any of the base editors provided herein. It should also be appreciated that the editing can comprise a sequential editing of a plurality of nucleobase pairs.

### Introduction of Gene Edits for Treating Sickle Cell Disease

[0585] Exemplary guide RNA spacer sequences and nucleobase changes are provided in Table 10 below.

TABLE 10
Introduction of Gene Regulator Edits

| | Nucleotide | Base | | |
|---|---|---|---|---|
| Gene | change | Editor | gRNA Spacer Sequence | PAM |
| HBG1/2 | c. −198 T > C | ABE | GUGGGGAAGGGGCCCCCAAG | AGG |
| | | | (SEQ ID NO: 144) | |
| HBG1/2 | c. −198 T > C | ABE | AUUGAGAUAGUGUGGGGAAG | GGG |
| | | | (SEQ ID NO: 145) | |
| HBG1/2 | c. −198 T > C | ABE | CAUUGAGAUAGUGUGGGGAA | GGG |
| | | | (SEQ ID NO: 146) | |
| HBG1/2 | c. −198 T > C | ABE | GCAUUGAGAUAGUGUGGGGA | AGG |
| | | | (SEQ ID NO: 147) | |
| HBG1/2 | c. −198 T > C | ABE | GUGGGGAAGGGGCCCCCAAG | AGG |
| | | | (SEQ ID NO: 144) | |
| HBG1/2 | c. −114 ~ −102 | CBE | GCUAUUGGUCAAGGCAAGGC | TGG |
| | deletion | and/or | (SEQ ID NO: 148) | |
| | | ABE | | |
| HBG1/2 | c. −114 ~ −102 | CBE | CAAGGCUAUUGGUCAAGGCA | AGG |
| | deletion | and/or | (SEQ ID NO: 149) | |
| | | ABE | | |
| HBG1/2 | c. −114 ~ −102 | CBE | CUUGUCAAGGCUAUUGGUCA | AGG |
| | deletion | and/or | (SEQ ID NO: 150) | |
| | | ABE | | |
| HBG1/2 | c. −114 ~ −102 | CBE | CUUGACCAAUAGCCUUGACA (SEQ | AGG |
| | deletion | and/or | ID NO: 151) | |
| | | ABE | | |
| HBG1/2 | c. −114 ~ −102 | CBE | GUUUGCCUUGUCAAGGCUAU | TGG |
| | deletion | and/or | (SEQ ID NO: 152) | |
| | | ABE | | |
| HBG1/2 | c. −114 ~ −102 | CBE | UGGUCAAGUUUGCCUUGUCA | AGG |
| | deletion | and/or | (SEQ ID NO: 153) | |
| | | ABE | | |
| HBG1/2 | c. −198 T > C | ABE | UGGGGAAGGGGCCCCCAAGA | GGA |
| | | | (SEQ ID NO: 154) | |
| HBG1/2 | c. −198 T > C | ABE | GUGUGGGGAAGGGGCCCCCA | AGA |
| | | | (SEQ ID NO: 155) | |
| HBG1/2 | c. −175 T > C | ABE | UCAGACAGAUAUUUGCAUUG | AGA |
| | | | (SEQ ID NO: 156) | |
| HBG1/2 | c. −175 T > C | ABE | UUUCAGACAGAUAUUUGCAU | TGA |
| | | | (SEQ ID NO: 157) | |
| HBG1/2 | c. −114 ~ −102 | CBE | CUUGCCUUGACCAAUAGCCU (SEQ | TGA |
| | deletion | and/or | ID NO: 158) | |
| | | ABE | | |
| HBG1/2 | c. −114 ~ −102 | CBE | UAGCCUUGACAAGGCAAACU | TGA |
| | deletion | and/or | (SEQ ID NO: 159) | |
| | | ABE | | |
| HBG1/2 | c. −90 BCL11A | CBE | CAAACUUGACCAAUAGUCUU | AGA |
| | binding | and/or | (SEQ ID NO: 160) | |
| | | ABE | | |
| HBG1/2 | c. −198 T > C | ABE | UGUGGGGAAGGGGCCCCCAA | GAGGAT |
| | | | (SEQ ID NO: 161) | |
| HBG1/2 | c. −202 C > T, −201 | CBE | GGGCCCCUUCCCCACACUAU (SEQ | CTCAAT |
| | C > T, −198 T > C, | and/or | ID NO: 162) | |
| | −197 C > T, −196 | ABE | | |
| | C > T, −195 C > G | | | |
| HBG1/2 | c. −175 T > C | ABE | CAGACAGAUAUUUGCAUUGA | GATAGT |
| | | | (SEQ ID NO: 163) | |
| HBG1/2 | c. −175 T > C | ABE | UUUCAGACAGAUAUUUGCAU | TGAGAT |
| | | | (SEQ ID NO: 157) | |
| HBG1/2 | c. −114 ~ −102 | CBE | GCCUUGACAAGGCAAACUUG | ACCAAT |
| | deletion | and/or | (SEQ ID NO: 164) | |
| | | ABE | | |
| HBG1/2 | c. −114 ~ −102 | CBE | UUGACAAGGCAAACUUGACC | AATAGT |
| | deletion | and/or | (SEQ ID NO: 165) | |
| | | ABE | | |
| HBG1/2 | c. −90 BCL11A | CBE | UGACCAAUAGUCUUAGAGUA | TCCAGT |
| | binding | and/or | (SEQ ID NO: 166) | |
| | | ABE | | |
| HBG1/2 | c. −175 T > C | ABE | AGACAGAUAUUUGCAUUGAGAUA | TTT |
| | | | (SEQ ID NO: 167) | |

### Methods for Editing Nucleic Acids

[0586] Some aspects of the disclosure provide methods for editing a nucleic acid. In some embodiments, the method is a method for editing a nucleobase of a nucleic acid molecule encoding a HBG (e.g., a base pair of a double-stranded DNA sequence). In some embodiments, the method comprises the steps of: a) contacting a target region of a nucleic acid (e.g., a double-stranded DNA sequence) with a complex comprising a base editor and a guide nucleic acid (e.g., gRNA), b) inducing strand separation of said target region, c) converting a first nucleobase of said target nucleobase pair in a single strand of the target region to a second nucleobase, and d) cutting no more than one strand of said target region using the nCas9, where a third nucleobase complementary to the first nucleobase base is replaced by a fourth nucleobase complementary to the second nucleobase. In some embodiments, the method results in less than 20% indel formation in the nucleic acid. It should be appreciated that in some embodiments, step b is omitted. In some embodiments, the method results in less than 19%, 18%, 16%, 14%, 12%, 10%, 8%, 6%, 4%, 2%, 1%, 0.5%, 0.2%, or less than 0.1% indel formation. In some embodiments, the method further comprises replacing the second nucleobase with a fifth nucleobase that is complementary to the fourth nucleobase, thereby generating an intended edited base pair (e.g., G•C to A•T). In some embodiments, at least 5% of the intended base pairs are edited. In some embodiments, at least 10%, 15%, 20%, 25%, 30%, 35%, 40%, 45%, or 50% of the intended base pairs are edited.

[0587] In some embodiments, the ratio of intended products to unintended products in the target nucleotide is at least 2:1, 5:1, 10:1, 20:1, 30:1, 40:1, 50:1, 60:1, 70:1, 80:1, 90:1, 100:1, or 200:1, or more. In some embodiments, the ratio of intended mutation to indel formation is greater than 1:1, 10:1, 50:1, 100:1, 500:1, or 1000:1, or more. In some embodiments, the cut single strand (nicked strand) is hybridized to the guide nucleic acid. In some embodiments, the cut single strand is opposite to the strand comprising the first nucleobase. In some embodiments, the base editor comprises a dCas9 domain. In some embodiments, the base editor protects or binds the non-edited strand. In some embodiments, the intended edited base pair is upstream of a PAM site. In some embodiments, the intended edited base pair is 1, 2, 3, 4, 5, 6, 7, 8, 9, 10, 11, 12, 13, 14, 15, 16, 17, 18, 19, or 20 nucleotides upstream of the PAM site. In some embodiments, the intended edited base pair is downstream of a PAM site. In some embodiments, the intended edited base pair is 1, 2, 3, 4, 5, 6, 7, 8, 9, 10, 11, 12, 13, 14, 15, 16, 17, 18, 19, or 20 nucleotides downstream stream of the PAM site. In some embodiments, the method does not require a canonical (e.g., NGG) PAM site. In some embodiments, the nucleobase editor comprises a linker. In some embodiments, the linker is 1-25 amino acids in length. In some embodiments, the linker is 5-20 amino acids in length. In some embodiments, linker is 10, 11, 12, 13, 14, 15, 16, 17, 18, 19, or 20 amino acids in length. In one embodiment, the linker is 32 amino acids in length. In another embodiment, a “long linker” is at least about 60 amino acids in length. In other embodiments, the linker is between about 3-100 amino acids in length. In some embodiments, the target region comprises a target window, wherein the target window comprises the target nucleobase pair. In some embodiments, the target window comprises 1-10 nucleotides. In some embodiments, the target window is 1-9, 1-8, 1-7, 1-6, 1-5, 1-4, 1-3, 1-2, or 1 nucleotides in length. In some embodiments, the target window is 1, 2, 3, 4, 5, 6, 7, 8, 9, 10, 11, 12, 13, 14, 15, 16, 17, 18, 19, or 20 nucleotides in length. In some embodiments, the intended edited base pair is within the target window. In some embodiments, the target window comprises the intended edited base pair. In some embodiments, the method is performed using any of the base editors provided herein.

[0588] In some embodiments, the disclosure provides methods for editing a nucleotide (e.g., SNP in the gene encoding HBG). In some embodiments, the disclosure provides a method for editing a nucleobase pair of a double-stranded DNA sequence. In some embodiments, the method comprises a) contacting a target region of the double-stranded DNA sequence with a complex comprising a base editor and a guide nucleic acid (e.g., gRNA), where the target region comprises a target nucleobase pair, b) inducing strand separation of said target region, c) converting a first nucleobase of said target nucleobase pair in a single strand of the target region to a second nucleobase, d) cutting no more than one strand of said target region, wherein a third nucleobase complementary to the first nucleobase base is replaced by a fourth nucleobase complementary to the second nucleobase, and the second nucleobase is replaced with a fifth nucleobase that is complementary to the fourth nucleobase, thereby generating an intended edited base pair, wherein the efficiency of generating the intended edited base pair is at least 5%. It should be appreciated that in some embodiments, step b is omitted. In some embodiments, at least 5% of the intended base pairs are edited. In some embodiments, at least 10%, 15%, 20%, 25%, 30%, 35%, 40%, 45%, or 50% of the intended base pairs are edited. In some embodiments, the method causes less than 19%, 18%, 16%, 14%, 12%, 10%, 8%, 6%, 4%, 2%, 1%, 0.5%, 0.2%, or less than 0.1% indel formation. In some embodiments, the ratio of intended product to unintended products at the target nucleotide is at least 2:1, 5:1, 10:1, 20:1, 30:1, 40:1, 50:1, 60:1, 70:1, 80:1, 90:1, 100:1, or 200:1, or more. In some embodiments, the ratio of intended mutation to indel formation is greater than 1:1, 10:1, 50:1, 100:1, 500:1, or 1000:1, or more. In some embodiments, the cut single strand is hybridized to the guide nucleic acid. In some embodiments, the cut single strand is opposite to the strand comprising the first nucleobase. In some embodiments, the intended edited base pair is upstream of a PAM site. In some embodiments, the intended edited base pair is 1, 2, 3, 4, 5, 6, 7, 8, 9, 10, 11, 12, 13, 14, 15, 16, 17, 18, 19, or 20 nucleotides upstream of the PAM site. In some embodiments, the intended edited base pair is downstream of a PAM site. In some embodiments, the intended edited base pair is 1, 2, 3, 4, 5, 6, 7, 8, 9, 10, 11, 12, 13, 14, 15, 16, 17, 18, 19, or 20 nucleotides downstream stream of the PAM site. In some embodiments, the method does not require a canonical (e.g., NGG) PAM site. In some embodiments, the linker is 1-25 amino acids in length. In some embodiments, the linker is 5-20 amino acids in length. In some embodiments, the linker is 10, 11, 12, 13, 14, 15, 16, 17, 18, 19, or 20 amino acids in length. In some embodiments, the target region comprises a target window, wherein the target window comprises the target nucleobase pair. In some embodiments, the target window comprises 1-10 nucleotides. In some embodiments, the target window is 1-9, 1-8, 1-7, 1-6, 1-5, 1-4, 1-3, 1-2, or 1 nucleotides in length. In some embodiments, the target window is 1, 2, 3, 4, 5, 6, 7, 8, 9, 10, 11, 12, 13, 14, 15, 16, 17, 18, 19, or 20 nucleotides in length. In some embodiments, the intended edited base pair occurs within the target window. In some embodiments, the target window comprises the intended edited base pair. In some embodiments, the nucleobase editor is any one of the base editors provided herein.

### Expression of Fusion Proteins in a Host Cell

[0589] Fusion proteins of the invention comprising an adenosine deaminase variant may be expressed in virtually any host cell of interest, including but not limited to bacteria, yeast, fungi, insects, plants, and animal cells using routine methods known to the skilled artisan. For example, a DNA encoding an adenosine deaminase of the invention can be cloned by designing suitable primers for the upstream and downstream of CDS based on the cDNA sequence. The cloned DNA may be directly, or after digestion with a restriction enzyme when desired, or after addition of a suitable linker and/or a nuclear localization signal ligated with a DNA encoding one or more additional components of a base editing system. The base editing system is translated in a host cell to form a complex.

[0590] A DNA encoding a protein domain described herein can be obtained by chemically synthesizing the DNA, or by connecting synthesized partly overlapping oligoDNA short chains by utilizing the PCR method and the Gibson Assembly method to construct a DNA encoding the full length thereof. The advantage of constructing a full-length DNA by chemical synthesis or a combination of PCR method or Gibson Assembly method is that the codon to be used can be designed in CDS full-length according to the host into which the DNA is introduced. In the expression of a heterologous DNA, the protein expression level is expected to increase by converting the DNA sequence thereof to a codon highly frequently used in the host organism. As the data of codon use frequency in host to be used, for example, the genetic code use frequency database (http://www.kazusa.or.jp/codon/index.html) disclosed in the home page of Kazusa DNA Research Institute can be used, or documents showing the codon use frequency in each host may be referred to. By reference to the obtained data and the DNA sequence to be introduced, codons showing low use frequency in the host from among those used for the DNA sequence may be converted to a codon coding the same amino acid and showing high use frequency.

[0591] An expression vector containing a DNA encoding a nucleic acid sequence-recognizing module and/or a nucleic acid base converting enzyme can be produced, for example, by linking the DNA to the downstream of a promoter in a suitable expression vector.

[0592] As the expression vector, Escherichia coli-derived plasmids (e.g., pBR322, pBR325, pUC12, pUC13); Bacillus subtilis-derived plasmids (e.g., pUB110, pTP5, pC194); yeast-derived plasmids (e.g., pSH19, pSH15); insect cell expression plasmids (e.g., pFast-Bac); animal cell expression plasmids (e.g., pA1-11, pXT1, pRc/CMV, pRc/RSV, pcDNAI/Neo); bacteriophages such as .lamda.phage and the like; insect virus vectors such as baculovirus and the like (e.g., BmNPV, AcNPV); animal virus vectors such as retrovirus, vaccinia virus, adenovirus and the like, and the like are used.

[0593] As the promoter, any promoter appropriate for a host to be used for gene expression can be used. In a conventional method using DSB, since the survival rate of the host cell sometimes decreases markedly due to the toxicity, it is desirable to increase the number of cells by the start of the induction by using an inductive promoter. However, since sufficient cell proliferation can also be afforded by expressing the nucleic acid-modifying enzyme complex of the present invention, a constitution promoter can also be used without limitation.

[0594] For example, when the host is an animal cell, SR.alpha. promoter, SV40 promoter, LTR promoter, CMV (cytomegalovirus) promoter, RSV (Rous sarcoma virus) promoter, MoMuLV (Moloney mouse leukemia virus) LTR, HSV-TK (simple herpes virus thymidine kinase) promoter and the like are used. Of these, CMV promoter, SR.alpha. promoter and the like are preferable.

[0595] When the host is Escherichia coli, trp promoter, lac promoter, recA promoter, lamda.P.sub.L promoter, 1pp promoter, T7 promoter and the like are preferable.

[0596] When the host is genus Bacillus, SPO1 promoter, SPO2 promoter, penP promoter and the like are preferable.

[0597] When the host is a yeast, Gal l/10 promoter, PHOS promoter, PGK promoter, GAP promoter, ADH promoter and the like are preferable.

[0598] When the host is an insect cell, polyhedrin promoter, P10 promoter and the like are preferable.

[0599] When the host is a plant cell, CaMV35S promoter, CaMV19S promoter, NOS promoter and the like are preferable.

[0600] As the expression vector, besides those mentioned above, one containing enhancer, splicing signal, terminator, polyA addition signal, a selection marker such as drug resistance gene, auxotrophic complementary gene and the like, replication origin and the like on demand can be used.

[0601] An RNA encoding a protein domain described herein can be prepared by, for example, transcription to mRNA in a vitro transcription system known per se by using a vector encoding DNA encoding the above-mentioned nucleic acid sequence-recognizing module and/or a nucleic acid base converting enzyme as a template.

[0602] A fusion protein of the invention can be intracellularly expressed by introducing an expression vector containing a DNA encoding a nucleic acid sequence-recognizing module and/or a nucleic acid base converting enzyme into a host cell, and culturing the host cell.

[0603] As the host, genus Escherichia, genus Bacillus, yeast, insect cell, insect, animal cell and the like are used.

[0604] As the genus Escherichia, Escherichia coli K12.cndot.DH1 [Proc. Natl. Acad. Sci. USA, 60, 160 (1968)], Escherichia coli JM103 [Nucleic Acids Research, 9, 309 (1981)], Escherichia coli JA221 [Journal of Molecular Biology, 120, 517 (1978)], Escherichia coli HB101 [Journal of Molecular Biology, 41, 459 (1969)], Escherichia coli C600 [Genetics, 39, 440 (1954)] and the like are used.

[0605] As the genus Bacillus, Bacillus subtilis M1114 [Gene, 24, 255 (1983)], Bacillus subtilis 207-21 [Journal of Biochemistry, 95, 87 (1984)] and the like are used.

[0606] As the yeast, Saccharomyces cerevisiae AH22, AH22R.sup.-, NA87-11A, DKD-5D, 20B-12, Schizosaccharomyces pombe NCYC1913, NCYC2036, Pichia pastoris KM71 and the like are used.

[0607] As the insect cell when the virus is AcNPV, cells of cabbage armyworm larva-derived established line (Spodoptera frugiperda cell; Sf cell), MG1 cells derived from the mid-intestine of Trichoplusia ni, High Five™. cells derived from an egg of Trichoplusia ni, Mamestra brassicae-derived cells, Estigmena acrea-derived cells and the like are used. When the virus is BmNPV, cells of Bombyx mori-derived established line (Bombyx mori N cell; BmN cell) and the like are used as insect cells. As the Sf cell, for example, Sf9 cell (ATCC CRL1711), Sf21 cell [all above, In Vivo, 13, 213-217 (1977)] and the like are used.

[0608] As the insect, for example, larva of Bombyx mori, Drosophila, cricket and the like are used [Nature, 315, 592 (1985)].

[0609] As the animal cell, cell lines such as monkey COS-7 cell, monkey Vero cell, Chinese hamster ovary (CHO) cell, dhfr gene-deficient CHO cell, mouse L cell, mouse AtT-20 cell, mouse myeloma cell, rat GH3 cell, human FL cell and the like, pluripotent stem cells such as iPS cell, ES cell and the like of human and other mammals, and primary cultured cells prepared from various tissues are used. Furthermore, zebrafish embryo, Xenopus oocyte and the like can also be used.

[0610] As the plant cell, suspend cultured cells, callus, protoplast, leaf segment, root segment and the like prepared from various plants (e.g., grain such as rice, wheat, corn and the like, product crops such as tomato, cucumber, eggplant and the like, garden plants such as carnation, Eustoma russellianum and the like, experiment plants such as tobacco, Arabidopsis thaliana and the like, and the like) are used.

[0611] All the above-mentioned host cells may be haploid (monoploid), or polyploid (e.g., diploid, triploid, tetraploid and the like). In the conventional mutation introduction methods, mutation is, in principle, introduced into only one homologous chromosome to produce a hetero gene type. Therefore, desired phenotype is not expressed unless dominant mutation occurs, and homozygosity inconveniently requires labor and time. In contrast, according to the present invention, since mutation can be introduced into any allele on the homologous chromosome in the genome, desired phenotype can be expressed in a single generation even in the case of recessive mutation, which is extremely useful since the problem of the conventional method can be solved.

[0612] An expression vector can be introduced by a known method (e.g., lysozyme method, competent method, PEG method, CaCl₂ coprecipitation method, electroporation method, the microinjection method, the particle gun method, lipofection method, Agrobacterium method and the like) according to the kind of the host.

[0613] Escherichia coli can be transformed according to the methods described in, for example, Proc. Natl. Acad. Sci. USA, 69, 2110 (1972), Gene, 17, 107 (1982) and the like.

[0614] The genus Bacillus can be introduced into a vector according to the methods described in, for example, Molecular & General Genetics, 168, 111 (1979) and the like.

[0615] A yeast can be introduced into a vector according to the methods described in, for example, Methods in Enzymology, 194, 182-187 (1991), Proc. Natl. Acad. Sci. USA, 75, 1929 (1978) and the like.

[0616] An insect cell and an insect can be introduced into a vector according to the methods described in, for example, Bio/Technology, 6, 47-55 (1988) and the like.

[0617] An animal cell can be introduced into a vector according to the methods described in, for example, Cell Engineering additional volume 8, New Cell Engineering Experiment Protocol, 263-267 (1995) (published by Shujunsha), and Virology, 52, 456 (1973).

[0618] A cell introduced with a vector can be cultured according to a known method according to the kind of the host.

[0619] For example, when Escherichia coli or genus Bacillus is cultured, a liquid medium is preferable as a medium to be used for the culture. The medium preferably contains a carbon source, nitrogen source, inorganic substance and the like necessary for the growth of the transformant. Examples of the carbon source include glucose, dextrin, soluble starch, sucrose and the like; examples of the nitrogen source include inorganic or organic substances such as ammonium salts, nitrate salts, corn steep liquor, peptone, casein, meat extract, soybean cake, potato extract and the like; and examples of the inorganic substance include calcium chloride, sodium dihydrogen phosphate, magnesium chloride and the like. The medium may contain yeast extract, vitamins, growth promoting factor and the like. The pH of the medium is preferably about 5-about 8.

[0620] As a medium for culturing Escherichia coli, for example, M9 medium containing glucose, casamino acid [Journal of Experiments in Molecular Genetics, 431-433, Cold Spring Harbor Laboratory, New York 1972] is preferable. Where necessary, for example, agents such as 3.beta.-indolylacrylic acid may be added to the medium to ensure an efficient function of a promoter. Escherichia coli is cultured at generally about 15-about 43° C. Where necessary, aeration and stirring may be performed.

[0621] The genus Bacillus is cultured at generally about 30-about 40° C. Where necessary, aeration and stirring may be performed.

[0622] Examples of the medium for culturing yeast include Burkholder minimum medium [Proc. Natl. Acad. Sci. USA, 77, 4505 (1980)], SD medium containing 0.5% casamino acid [Proc. Natl. Acad. Sci. USA, 81, 5330 (1984)] and the like. The pH of the medium is preferably about 5-about 8. The culture is performed at generally about 20° C.-about 35° C. Where necessary, aeration and stirring may be performed.

[0623] As a medium for culturing an insect cell or insect, for example, Grace's Insect Medium [Nature, 195, 788 (1962)] containing an additive such as inactivated 10% bovine serum and the like as appropriate and the like are used. The pH of the medium is preferably about 6.2 to about 6.4. The culture is performed at generally about 27° C. Where necessary, aeration and stirring may be performed.

[0624] As a medium for culturing an animal cell, for example, minimum essential medium (MEM) containing about 5-about 20% of fetal bovine serum [Science, 122, 501 (1952)], Dulbecco's modified Eagle medium (DMEM) [Virology, 8, 396 (1959)], RPMI 1640 medium [The Journal of the American Medical Association, 199, 519 (1967)], 199 medium [Proceeding of the Society for the Biological Medicine, 73, 1 (1950)] and the like are used. The pH of the medium is preferably about 6-about 8. The culture is performed at generally about 30° C.-about 40° C. Where necessary, aeration and stirring may be performed.

[0625] As a medium for culturing a plant cell, for example, MS medium, LS medium, B5 medium and the like are used. The pH of the medium is preferably about 5-about 8. The culture is performed at generally about 20° C.-about 30° C. Where necessary, aeration and stirring may be performed.

[0626] When a higher eukaryotic cell, such as animal cell, insect cell, plant cell and the like is used as a host cell, a DNA encoding a base editing system of the present invention (e.g., comprising an adenosine deaminase variant) is introduced into a host cell under the regulation of an inducible promoter (e.g., metallothionein promoter (induced by heavy metal ion), heat shock protein promoter (induced by heat shock), Tet-ON/Tet-OFF system promoter (induced by addition or removal of tetracycline or a derivative thereof), steroid-responsive promoter (induced by steroid hormone or a derivative thereof) etc.), the induction substance is added to the medium (or removed from the medium) at an appropriate stage to induce expression of the nucleic acid-modifying enzyme complex, culture is performed for a given period to carry out a base editing and, introduction of a mutation into a target gene, transient expression of the base editing system can be realized.

[0627] Prokaryotic cells such as Escherichia coli and the like can utilize an inducible promoter. Examples of the inducible promoter include, but are not limited to, lac promoter (induced by IPTG), cspA promoter (induced by cold shock), araBAD promoter (induced by arabinose) and the like.

[0628] Alternatively, the above-mentioned inductive promoter can also be utilized as a vector removal mechanism when higher eukaryotic cells, such as animal cell, insect cell, plant cell and the like are used as a host cell. That is, a vector is mounted with a replication origin that functions in a host cell, and a nucleic acid encoding a protein necessary for replication (e.g., SV40 on and large T antigen, oriP and EBNA-1 etc. for animal cells), of the expression of the nucleic acid encoding the protein is regulated by the above-mentioned inducible promoter. As a result, while the vector is autonomously replicatable in the presence of an induction substance, when the induction substance is removed, autonomous replication is not available, and the vector naturally falls off along with cell division (autonomous replication is not possible by the addition of tetracycline and doxycycline in Tet-OFF system vector).

### Delivery System

[0629] Nucleic Acid-Based Delivery of a Nucleobase Editors and gRNAs

[0630] Nucleic acids encoding nucleobase editors according to the present disclosure can be administered to subjects or delivered into cells in vitro (e.g., hematopoietic stem cells, hematopoietic cells, embryonic stem cells, induced pluripotent stem cells (iPSCs), organoids, and cells in vivo (e.g., bone marrow) by art-known methods or as described herein. In one embodiment, nucleobase editors are selectively delivered to cells (e.g., hematopoietic cells or their progenitors, hematopoietic stem cells, and/or induced pluripotent stem cells). In other embodiments, nucleic acids encoding nucleobase editors are delivered to hematopoietic cells or their progenitors, hematopoietic stem cells, and/or induced pluripotent stem cells comprising mutations in the beta-globin gene, HBB (e.g., HbS). Such cells can be used to assay the functional effects of HBB editing. In one embodiment, the effect of an altered HBB is examined in a red blood cell where restoration of normal red blood cell morphology indicates the presence of functional HBB. In one embodiment, nucleobase editors can be delivered by, e.g., vectors (e.g., viral or non-viral vectors), non-vector-based methods (e.g., using naked DNA, DNA complexes, lipid nanoparticles), or a combination thereof.

[0631] Nucleic acids encoding nucleobase editors can be delivered directly to cells (e.g., hematopoietic cells or their progenitors, hematopoietic stem cells, and/or induced pluripotent stem cells) as naked DNA or RNA, for instance by means of transfection or electroporation, or can be conjugated to molecules (e.g., N-acetylgalactosamine) promoting uptake by the target cells. Nucleic acid vectors, such as the vectors described herein can also be used.

[0632] Nucleic acid vectors can comprise one or more sequences encoding a domain of a fusion protein described herein. A vector can also comprise a sequence encoding a signal peptide (e.g., for nuclear localization, nucleolar localization, or mitochondrial localization), associated with (e.g., inserted into or fused to) a sequence coding for a protein. As one example, a nucleic acid vectors can include a Cas9 coding sequence that includes one or more nuclear localization sequences (e.g., a nuclear localization sequence from SV40), and a adenosine deaminase variant (e.g., ABE8).

[0633] The nucleic acid vector can also include any suitable number of regulatory/control elements, e.g., promoters, enhancers, introns, polyadenylation signals, Kozak consensus sequences, or internal ribosome entry sites (IRES). These elements are well known in the art. For hematopoietic cells suitable promoters can include IFNbeta or CD45.

[0634] Nucleic acid vectors according to this disclosure include recombinant viral vectors. Exemplary viral vectors are set forth herein. Other viral vectors known in the art can also be used. In addition, viral particles can be used to deliver genome editing system components in nucleic acid and/or peptide form. For example, “empty” viral particles can be assembled to contain any suitable cargo. Viral vectors and viral particles can also be engineered to incorporate targeting ligands to alter target tissue specificity.

[0635] In addition to viral vectors, non-viral vectors can be used to deliver nucleic acids encoding genome editing systems according to the present disclosure. One important category of non-viral nucleic acid vectors are nanoparticles, which can be organic or inorganic. Nanoparticles are well known in the art. Any suitable nanoparticle design can be used to deliver genome editing system components or nucleic acids encoding such components. For instance, organic (e.g. lipid and/or polymer) nanoparticles can be suitable for use as delivery vehicles in certain embodiments of this disclosure. Exemplary lipids for use in nanoparticle formulations, and/or gene transfer are shown in Table 11 below.

TABLE 11
Lipids Used for Gene Transfer

| Lipid | Abbreviation | Feature |
|---|---|---|
| 1,2-Dioleoyl-sn-glycero-3-phosphatidylcholine | DOPC | Helper |
| 1,2-Dioleoyl-sn-glycero-3-phosphatidylethanolamine | DOPE | Helper |
| Cholesterol | | Helper |
| N-[1-(2,3-Dioleyloxy)prophyl]N,N,N-trimethylammonium | DOTMA | Cationic |
| chloride | | |
| 1,2-Dioleoyloxy-3-trimethylammonium-propane | DOTAP | Cationic |
| Dioctadecylamidoglycylspermine | DOGS | Cationic |
| N-(3-Aminopropyl)-N,N-dimethyl-2,3-bis(dodecyloxy)-1- | GAP-DLRIE | Cationic |
| propanaminium bromide | | |
| Cetyltrimethylammonium bromide | CTAB | Cationic |
| 6-Lauroxyhexyl ornithinate | LHON | Cationic |
| 1-(2,3-Dioleoyloxypropyl)-2,4,6-trimethylpyridinium | 2Oc | Cationic |
| 2,3-Dioleyloxy-N-[2(sperminecarboxamido-ethyl]-N,N- | DOSPA | Cationic |
| dimethyl-1-propanaminium trifluoroacetate | | |
| 1,2-Dioleyl-3-trimethylammonium-propane | DOPA | Cationic |
| N-(2-Hydroxyethyl)-N,N-dimethyl-2,3-bis(tetradecyloxy)-1- | MDRIE | Cationic |
| propanaminium bromide | | |
| Dimyristooxypropyl dimethyl hydroxyethyl ammonium bromide | DMRI | Cationic |
| 3β-[N-(N′,N′-Dimethylaminoethane)-carbamoyl]cholesterol | DC-Chol | Cationic |
| Bis-guanidium-tren-cholesterol | BGTC | Cationic |
| 1,3-Diodeoxy-2-(6-carboxy-spermyl)-propylamide | DOSPER | Cationic |
| Dimethyloctadecylammonium bromide | DDAB | Cationic |
| Dioctadecylamidoglicylspermidin | DSL | Cationic |
| rac-[(2,3-Dioctadecyloxypropyl)(2-hydroxyethyl)]- | CLIP-1 | Cationic |
| dimethylammonium chloride | | |
| rac-[2(2,3-Dihexadecyloxypropyl- | CLIP-6 | Cationic |
| oxymethyloxy)ethyl]trimethylammoniun bromide | | |
| Ethyldimyristoylphosphatidylcholine | EDMPC | Cationic |
| 1,2-Distearyloxy-N,N-dimethyl-3-aminopropane | DSDMA | Cationic |
| 1,2-Dimyristoyl-trimethylammonium propane | DMTAP | Cationic |
| O,O′-Dimyristyl-N-lysyl aspartate | DMKE | Cationic |
| 1,2-Distearoyl-sn-glycero-3-ethylpho sphocholine | DSEPC | Cationic |
| N-Palmitoyl D-erythro-sphingosyl carbamoyl-spermine | CCS | Cationic |
| N-t-Butyl-N0-tetradecyl-3-tetradecylaminopropionamidine | diC14-amidine | Cationic |
| Octadecenolyoxy[ethyl-2-heptadecenyl-3 hydroxyethyl] | DOTIM | Cationic |
| imidazolinium chloride | | |
| N1-Cholesteryloxycarbonyl-3,7-diazanonane-1,9-diamine | CDAN | Cationic |
| 2-(3-[Bis(3-amino-propyl)-amino]propylamino)-N- | RPR209120 | Cationic |
| ditetradecylcarbamoylme-ethyl-acetamide | | |
| 1,2-dilinoleyloxy-3-dimethylaminopropane | DLinDMA | Cationic |
| 2,2-dilinoleyl-4-dimethylaminoethyl-[1,3]-dioxolane | DLin-KC2-DMA | Cationic |
| dilinoleyl-methyl-4-dimethylaminobutyrate | DLin-MC3-DMA | Cationic |

[0636] Table 12 lists exemplary polymers for use in gene transfer and/or nanoparticle formulations.

TABLE 12
Polymers Used for Gene Transfer

| Polymer | Abbreviation |
|---|---|
| Poly(ethylene)glycol | PEG |
| Polyethylenimine | PEI |
| Dithiobis (succinimidylpropionate) | DSP |
| Dimethyl-3,3′-dithiobispropionimidate | DTBP |
| Poly(ethylene imine)biscarbamate | PEIC |
| Poly(L-lysine) | PLL |
| Histidine modified PLL | |
| Poly(N-vinylpyrrolidone) | PVP |
| Poly(propylenimine) | PPI |
| Poly(amidoamine) | PAMAM |
| Poly(amidoethylenimine) | SS-PAEI |
| Triethylenetetramine | TETA |
| Poly(β-aminoester) | |
| Poly(4-hydroxy-L-proline ester) | PHP |
| Poly(allylamine) | |
| Poly(α-[4-aminobutyl]-L-glycolic acid) | PAGA |
| Poly(D,L-lactic-co-glycolic acid) | PLGA |
| Poly(N-ethyl-4-vinylpyridinium bromide) | |
| Poly(phosphazene)s | PPZ |
| Poly(phosphoester)s | PPE |
| Poly(phosphoramidate)s | PPA |
| Poly(N-2-hydroxypropylmethacrylamide) | pHPMA |
| Poly (2-(dimethylamino)ethyl methacrylate) | pDMAEMA |
| Poly(2-aminoethyl propylene phosphate) | PPE-EA |
| Chitosan | |
| Galactosylated chitosan | |
| N-Dodacylated chitosan | |
| Histone | |
| Collagen | |
| Dextran-spermine | D-SPM |

[0637] Table 13 summarizes delivery methods for a polynucleotide encoding a fusion protein described herein.

TABLE 13

| | | Delivery into | | | Type of |
|---|---|---|---|---|---|
| | | Non-Dividing | Duration of | Genome | Molecule |
| Delivery | Vector/Mode | Cells | Expression | Integration | Delivered |
| Physical | (e.g., | YES | Transient | NO | Nucleic Acids |
| | electroporation, | | | | and Proteins |
| | particle gun, | | | | |
| | Calcium | | | | |
| | Phosphate | | | | |
| | transfection | | | | |
| Viral | Retrovirus | NO | Stable | YES | RNA |
| | Lentivirus | YES | Stable | YES/NO with | RNA |
| | | | | modification | |
| | Adenovirus | YES | Transient | NO | DNA |
| | Adeno- | YES | Stable | NO | DNA |
| | Associated | | | | |
| | Virus (AAV) | | | | |
| | Vaccinia Virus | YES | Very | NO | DNA |
| | | | Transient | | |
| | Herpes Simplex | YES | Stable | NO | DNA |
| | Virus | | | | |
| Non-Viral | Cationic | YES | Transient | Depends on | Nucleic Acids |
| | Liposomes | | | what is | and Proteins |
| | | | | delivered | |
| | Polymeric | YES | Transient | Depends on | Nucleic Acids |
| | Nanoparticles | | | what is | and Proteins |
| | | | | delivered | |
| Biological | Attenuated | YES | Transient | NO | Nucleic Acids |
| Non-Viral | Bacteria | | | | |
| Delivery | Engineered | YES | Transient | NO | Nucleic Acids |
| Vehicles | Bacteriophages | YES | Transient | NO | Nucleic Acids |
| | Mammalian | | | | |
| | Virus-like | | | | |
| | Particles | | | | |
| | Biological | YES | Transient | NO | Nucleic Acids |
| | liposomes: | | | | |
| | Erythrocyte | | | | |
| | Ghosts and | | | | |
| | Exosomes | | | | |

[0638] In another aspect, the delivery of genome editing system components or nucleic acids encoding such components, for example, a nucleic acid binding protein such as, for example, Cas9 or variants thereof, and a gRNA targeting a genomic nucleic acid sequence of interest, may be accomplished by delivering a ribonucleoprotein (RNP) to cells. The RNP comprises the nucleic acid binding protein, e.g., Cas9, in complex with the targeting gRNA. RNPs may be delivered to cells using known methods, such as electroporation, nucleofection, or cationic lipid-mediated methods, for example, as reported by Zuris, J. A. et al., 2015, Nat. Biotechnology, 33(1):73-80. RNPs are advantageous for use in CRISPR base editing systems, particularly for cells that are difficult to transfect, such as primary cells. In addition, RNPs can also alleviate difficulties that may occur with protein expression in cells, especially when eukaryotic promoters, e.g., CMV or EF1A, which may be used in CRISPR plasmids, are not well-expressed. Advantageously, the use of RNPs does not require the delivery of foreign DNA into cells. Moreover, because an RNP comprising a nucleic acid binding protein and gRNA complex is degraded over time, the use of RNPs has the potential to limit off-target effects. In a manner similar to that for plasmid-based techniques, RNPs can be used to deliver binding protein (e.g., Cas9 variants) and to direct homology directed repair (HDR).

[0639] A promoter used to drive base editor coding nucleic acid molecule expression can include AAV ITR. This can be advantageous for eliminating the need for an additional promoter element, which can take up space in the vector. The additional space freed up can be used to drive the expression of additional elements, such as a guide nucleic acid or a selectable marker. ITR activity is relatively weak, so it can be used to reduce potential toxicity due to over expression of the chosen nuclease.

[0640] Any suitable promoter can be used to drive expression of the base editor and, where appropriate, the guide nucleic acid. For ubiquitous expression, promoters that can be used include CMV, CAG, CBh, PGK, SV40, Ferritin heavy or light chains, etc. For brain or other CNS cell expression, suitable promoters can include: Synapsin1 for all neurons, CaMKIIalpha for excitatory neurons, GAD67 or GAD65 or VGAT for GABAergic neurons, etc. For liver cell expression, suitable promoters include the Albumin promoter. For lung cell expression, suitable promoters can include SP-B. For endothelial cells, suitable promoters can include ICAM. For hematopoietic cells suitable promoters can include IFNbeta or CD45. For Osteoblasts suitable promoters can include OG-2.

[0641] In some embodiments, a base editor of the present disclosure is of small enough size to allow separate promoters to drive expression of the base editor and a compatible guide nucleic acid within the same nucleic acid molecule. For instance, a vector or viral vector can comprise a first promoter operably linked to a nucleic acid encoding the base editor and a second promoter operably linked to the guide nucleic acid.

[0642] The promoter used to drive expression of a guide nucleic acid can include: Pol III promoters such as U6 or H1 Use of Pol II promoter and intronic cassettes to express gRNA Adeno Associated Virus (AAV).

[0643] In some aspects, the disclosure relates to the viral delivery of a nucleobase editor targeting a HBB mutation using, for example, a viral vector. Exemplary viral vectors include retroviral vectors (e.g. Maloney murine leukemia virus, MML-V), adenoviral vectors (e.g. AD100), lentiviral vectors (HIV and FIV-based vectors), herpesvirus vectors (e.g. HSV-2), and adeno-associated viral vectors.

### Viral Vectors

[0644] A base editor described herein can therefore be delivered with viral vectors. In some embodiments, a base editor disclosed herein can be encoded on a nucleic acid that is contained in a viral vector. In some embodiments, one or more components of the base editor system can be encoded on one or more viral vectors. For example, a base editor and guide nucleic acid can be encoded on a single viral vector. In other cases, the base editor and guide nucleic acid are encoded on different viral vectors. In either case, the base editor and guide nucleic acid can each be operably linked to a promoter and terminator. The combination of components encoded on a viral vector can be determined by the cargo size constraints of the chosen viral vector.

[0645] The use of RNA or DNA viral based systems for the delivery of a base editor takes advantage of highly evolved processes for targeting a virus to specific cells in culture or in the host and trafficking the viral payload to the nucleus or host cell genome. Viral vectors can be administered directly to cells in culture, patients (in vivo), or they can be used to treat cells in vitro, and the modified cells can optionally be administered to patients (ex vivo). Conventional viral based systems could include retroviral, lentivirus, adenoviral, adeno-associated and herpes simplex virus vectors for gene transfer. Integration in the host genome is possible with the retrovirus, lentivirus, and adeno-associated virus gene transfer methods, often resulting in long term expression of the inserted transgene. Additionally, high transduction efficiencies have been observed in many different cell types and target tissues.

[0646] Viral vectors can include lentivirus (e.g., HIV and FIV-based vectors), Adenovirus (e.g., AD100), Retrovirus (e.g., Maloney murine leukemia virus, MML-V), herpesvirus vectors (e.g., HSV-2), and Adeno-associated viruses (AAVs), or other plasmid or viral vector types, in particular, using formulations and closes from, for example, U.S. Pat. No. 8,454,972 (formulations, doses for adenovirus), U.S. Pat. No. 8,404,658 (formulations, doses for AAV) and U.S. Pat. No. 5,846,946 (formulations, doses for DNA plasmids) and from clinical trials and publications regarding the clinical trials involving lentivirus, AAV and adenovirus. For example, for AAV, the route of administration, formulation and dose can be as in U.S. Pat. No. 8,454,972 and as in clinical trials involving AAV. For Adenovirus, the route of administration, formulation and dose can be as in U.S. Pat. No. 8,404,658 and as in clinical trials involving adenovirus. For plasmid delivery, the route of administration, formulation and dose can be as in U.S. Pat. No. 5,846,946 and as in clinical studies involving plasmids. Doses can be based on or extrapolated to an average 70 kg individual (e.g. a male adult human), and can be adjusted for patients, subjects, mammals of different weight and species. Frequency of administration is within the ambit of the medical or veterinary practitioner (e.g., physician, veterinarian), depending on usual factors including the age, sex, general health, other conditions of the patient or subject and the particular condition or symptoms being addressed. The viral vectors can be injected into the tissue of interest. For cell-type specific base editing, the expression of the base editor and optional guide nucleic acid can be driven by a cell-type specific promoter.

[0647] The tropism of a retrovirus can be altered by incorporating foreign envelope proteins, expanding the potential target population of target cells. Lentiviral vectors are retroviral vectors that are able to transduce or infect non-dividing cells and typically produce high viral titers. Selection of a retroviral gene transfer system would therefore depend on the target tissue. Retroviral vectors are comprised of cis-acting long terminal repeats with packaging capacity for up to 6-10 kb of foreign sequence. The minimum cis-acting LTRs are sufficient for replication and packaging of the vectors, which are then used to integrate the therapeutic gene into the target cell to provide permanent transgene expression. Widely used retroviral vectors include those based upon murine leukemia virus (MuLV), gibbon ape leukemia virus (GaLV), Simian Immuno deficiency virus (SIV), human immuno deficiency virus (HIV), and combinations thereof (See, e.g., Buchscher et al., J. Virol. 66:2731-2739 (1992); Johann et al., J. Virol. 66:1635-1640 (1992); Sommnerfelt et al., Virol. 176:58-59 (1990); Wilson et al., J. Virol. 63:2374-2378 (1989); Miller et al., J. Virol. 65:2220-2224 (1991); PCT/US94/05700).

[0648] Retroviral vectors, especially lentiviral vectors, can require polynucleotide sequences smaller than a given length for efficient integration into a target cell. For example, retroviral vectors of length greater than 9 kb can result in low viral titers compared with those of smaller size. In some aspects, a base editor of the present disclosure is of sufficient size so as to enable efficient packaging and delivery into a target cell via a retroviral vector. In some embodiments, a base editor is of a size so as to allow efficient packing and delivery even when expressed together with a guide nucleic acid and/or other components of a targetable nuclease system.

[0649] In applications where transient expression is preferred, adenoviral based systems can be used. Adenoviral based vectors are capable of very high transduction efficiency in many cell types and do not require cell division. With such vectors, high titer and levels of expression have been obtained. This vector can be produced in large quantities in a relatively simple system. Adeno-associated virus (“AAV”) vectors can also be used to transduce cells with target nucleic acids, e.g., in the in vitro production of nucleic acids and peptides, and for in vivo and ex vivo gene therapy procedures (See, e.g., West et al., Virology 160:38-47 (1987); U.S. Pat. No. 4,797,368; WO 93/24641; Kotin, Human Gene Therapy 5:793-801 (1994); Muzyczka, J. Clin. Invest. 94:1351 (1994). The construction of recombinant AAV vectors is described in a number of publications, including U.S. Pat. No. 5,173,414; Tratschin et al., Mol. Cell. Biol. 5:3251-3260 (1985); Tratschin, et al., Mol. Cell. Biol. 4:2072-2081 (1984); Hermonat & Muzyczka, PNAS 81:6466-6470 (1984); and Samulski et al., J. Virol. 63:03822-3828 (1989).

[0650] AAV is a small, single-stranded DNA dependent virus belonging to the parvovirus family. The 4.7 kb wild-type (wt) AAV genome is made up of two genes that encode four replication proteins and three capsid proteins, respectively, and is flanked on either side by 145-bp inverted terminal repeats (ITRs). The virion is composed of three capsid proteins, Vp1, Vp2, and Vp3, produced in a 1:1:10 ratio from the same open reading frame but from differential splicing (Vp1) and alternative translational start sites (Vp2 and Vp3, respectively). Vp3 is the most abundant subunit in the virion and participates in receptor recognition at the cell surface defining the tropism of the virus. A phospholipase domain, which functions in viral infectivity, has been identified in the unique N terminus of Vp1.

[0651] Similar to wt AAV, recombinant AAV (rAAV) utilizes the cis-acting 145-bp ITRs to flank vector transgene cassettes, providing up to 4.5 kb for packaging of foreign DNA. Subsequent to infection, rAAV can express a fusion protein of the invention and persist without integration into the host genome by existing episomally in circular head-to-tail concatemers. Although there are numerous examples of rAAV success using this system, in vitro and in vivo, the limited packaging capacity has limited the use of AAV-mediated gene delivery when the length of the coding sequence of the gene is equal or greater in size than the wt AAV genome.

[0652] Viral vectors can be selected based on the application. For example, for in vivo gene delivery, AAV can be advantageous over other viral vectors. In some embodiments, AAV allows low toxicity, which can be due to the purification method not requiring ultra-centrifugation of cell particles that can activate the immune response. In some embodiments, AAV allows low probability of causing insertional mutagenesis because it doesn't integrate into the host genome. Adenoviruses are commonly used as vaccines because of the strong immunogenic response they induce. Packaging capacity of the viral vectors can limit the size of the base editor that can be packaged into the vector.

[0653] AAV has a packaging capacity of about 4.5 Kb or 4.75 Kb including two 145 base inverted terminal repeats (ITRs). This means disclosed base editor as well as a promoter and transcription terminator can fit into a single viral vector. Constructs larger than 4.5 or 4.75 Kb can lead to significantly reduced virus production. For example, SpCas9 is quite large, the gene itself is over 4.1 Kb, which makes it difficult for packing into AAV. Therefore, embodiments of the present disclosure include utilizing a disclosed base editor which is shorter in length than conventional base editors. In some examples, the base editors are less than 4 kb. Disclosed base editors can be less than 4.5 kb, 4.4 kb, 4.3 kb, 4.2 kb, 4.1 kb, 4 kb, 3.9 kb, 3.8 kb, 3.7 kb, 3.6 kb, 3.5 kb, 3.4 kb, 3.3 kb, 3.2 kb, 3.1 kb, 3 kb, 2.9 kb, 2.8 kb, 2.7 kb, 2.6 kb, 2.5 kb, 2 kb, or 1.5 kb. In some embodiments, the disclosed base editors are 4.5 kb or less in length.

[0654] An AAV can be AAV1, AAV2, AAV5 or any combination thereof. One can select the type of AAV with regard to the cells to be targeted; e.g., one can select AAV serotypes 1, 2, 5 or a hybrid capsid AAV1, AAV2, AAV5 or any combination thereof for targeting brain or neuronal cells; and one can select AAV4 for targeting cardiac tissue. AAV8 is useful for delivery to the liver. A tabulation of certain AAV serotypes as to these cells can be found in Grimm, D. et al, J. Virol. 82: 5887-5911 (2008)).

[0655] Lentiviruses are complex retroviruses that have the ability to infect and express their genes in both mitotic and post-mitotic cells. The most commonly known lentivirus is the human immunodeficiency virus (HIV), which uses the envelope glycoproteins of other viruses to target a broad range of cell types.

[0656] Lentiviruses can be prepared as follows. After cloning pCasES10 (which contains a lentiviral transfer plasmid backbone), HEK293FT at low passage (p=5) were seeded in a T-75 flask to 50% confluence the day before transfection in DMEM with 10% fetal bovine serum and without antibiotics. After 20 hours, media is changed to OptiMEM (serum-free) media and transfection was done 4 hours later. Cells are transfected with 10 μg of lentiviral transfer plasmid (pCasES10) and the following packaging plasmids: 5 μg of pMD2. G (VSV-g pseudotype), and 7.5 μg of psPAX2 (gag/pol/rev/tat). Transfection can be done in 4 mL OptiMEM with a cationic lipid delivery agent (50 ul Lipofectamine 2000 and 100 ul Plus reagent). After 6 hours, the media is changed to antibiotic-free DMEM with 10% fetal bovine serum. These methods use serum during cell culture, but serum-free methods are preferred.

[0657] Lentivirus can be purified as follows. Viral supernatants are harvested after 48 hours. Supernatants are first cleared of debris and filtered through a 0.45 μm low protein binding (PVDF) filter. They are then spun in an ultracentrifuge for 2 hours at 24,000 rpm. Viral pellets are resuspended in 50 μl of DMEM overnight at 4° C. They are then aliquoted and immediately frozen at −80° C.

[0658] In another embodiment, minimal non-primate lentiviral vectors based on the equine infectious anemia virus (EIAV) are also contemplated. In another embodiment, RETINOSTAT®, an equine infectious anemia virus-based lentiviral gene therapy vector that expresses angiostatic proteins endostatin and angiostatin that is contemplated to be delivered via a subretinal injection. In another embodiment, use of a self-inactivating lentiviral vector is contemplated.

[0659] Any RNA of the systems, for example a guide RNA or a base editor-encoding mRNA, can be delivered in the form of RNA. Base editor-encoding mRNA can be generated using in vitro transcription. For example, nuclease mRNA can be synthesized using a PCR cassette containing the following elements: T7 promoter, optional kozak sequence (GCCACC), nuclease sequence, and 3′ UTR such as a 3′ UTR from beta globin-polyA tail. The cassette can be used for transcription by T7 polymerase. Guide polynucleotides (e.g., gRNA) can also be transcribed using in vitro transcription from a cassette containing a T7 promoter, followed by the sequence “GG”, and guide polynucleotide sequence.

[0660] To enhance expression and reduce possible toxicity, the base editor-coding sequence and/or the guide nucleic acid can be modified to include one or more modified nucleoside e.g. using pseudo-U or 5-Methyl-C.

[0661] The small packaging capacity of AAV vectors makes the delivery of a number of genes that exceed this size and/or the use of large physiological regulatory elements challenging. These challenges can be addressed, for example, by dividing the protein(s) to be delivered into two or more fragments, wherein the N-terminal fragment is fused to a split intein-N and the C-terminal fragment is fused to a split intein-C. These fragments are then packaged into two or more AAV vectors. As used herein, “intein” refers to a self-splicing protein intron (e.g., peptide) that ligates flanking N-terminal and C-terminal exteins (e.g., fragments to be joined). The use of certain inteins for joining heterologous protein fragments is described, for example, in Wood et al., J. Biol. Chem. 289(21); 14512-9 (2014). For example, when fused to separate protein fragments, the inteins IntN and IntC recognize each other, splice themselves out and simultaneously ligate the flanking N- and C-terminal exteins of the protein fragments to which they were fused, thereby reconstituting a full-length protein from the two protein fragments. Other suitable inteins will be apparent to a person of skill in the art.

[0662] A fragment of a fusion protein of the invention can vary in length. In some embodiments, a protein fragment ranges from 2 amino acids to about 1000 amino acids in length. In some embodiments, a protein fragment ranges from about 5 amino acids to about 500 amino acids in length. In some embodiments, a protein fragment ranges from about 20 amino acids to about 200 amino acids in length. In some embodiments, a protein fragment ranges from about 10 amino acids to about 100 amino acids in length. Suitable protein fragments of other lengths will be apparent to a person of skill in the art.

[0663] In one embodiment, dual AAV vectors are generated by splitting a large transgene expression cassette in two separate halves (5′ and 3′ ends, or head and tail), where each half of the cassette is packaged in a single AAV vector (of <5 kb). The re-assembly of the full-length transgene expression cassette is then achieved upon co-infection of the same cell by both dual AAV vectors followed by: (1) homologous recombination (HR) between 5′ and 3′ genomes (dual AAV overlapping vectors); (2) ITR-mediated tail-to-head concatemerization of 5′ and 3′ genomes (dual AAV trans-splicing vectors); or (3) a combination of these two mechanisms (dual AAV hybrid vectors). The use of dual AAV vectors in vivo results in the expression of full-length proteins. The use of the dual AAV vector platform represents an efficient and viable gene transfer strategy for transgenes of >4.7 kb in size.

### Inteins

[0664] In some embodiments, a portion or fragment of a nuclease (e.g., Cas9) is fused to an intein. The nuclease can be fused to the N-terminus or the C-terminus of the intein. In some embodiments, a portion or fragment of a fusion protein is fused to an intein and fused to an AAV capsid protein. The intein, nuclease and capsid protein can be fused together in any arrangement (e.g., nuclease-intein-capsid, intein-nuclease-capsid, capsid-intein-nuclease, etc.). In some embodiments, the N-terminus of an intein is fused to the C-terminus of a fusion protein and the C-terminus of the intein is fused to the N-terminus of an AAV capsid protein. Inteins (intervening protein) are auto-processing domains found in a variety of diverse organisms, which carry out a process known as protein splicing. Protein splicing is a multi-step biochemical reaction comprised of both the cleavage and formation of peptide bonds. While the endogenous substrates of protein splicing are proteins found in intein-containing organisms, inteins can also be used to chemically manipulate virtually any polypeptide backbone.

[0665] In protein splicing, the intein excises itself out of a precursor polypeptide by cleaving two peptide bonds, thereby ligating the flanking extein (external protein) sequences via the formation of a new peptide bond. This rearrangement occurs post-translationally (or possibly co-translationally). Intein-mediated protein splicing occurs spontaneously, requiring only the folding of the intein domain.

[0666] About 5% of inteins are split inteins, which are transcribed and translated as two separate polypeptides, the N-intein and C-intein, each fused to one extein. Upon translation, the intein fragments spontaneously and non-covalently assemble into the canonical intein structure to carry out protein splicing in trans. The mechanism of protein splicing entails a series of acyl-transfer reactions that result in the cleavage of two peptide bonds at the intein-extein junctions and the formation of a new peptide bond between the N- and C-exteins. This process is initiated by activation of the peptide bond joining the N-extein and the N-terminus of the intein. Virtually all inteins have a cysteine or serine at their N-terminus that attacks the carbonyl carbon of the C-terminal N-extein residue. This N to O/S acyl-shift is facilitated by a conserved threonine and histidine (referred to as the TXXH motif), along with a commonly found aspartate, which results in the formation of a linear (thio)ester intermediate. Next, this intermediate is subject to trans-(thio)esterification by nucleophilic attack of the first C-extein residue (+1), which is a cysteine, serine, or threonine. The resulting branched (thio)ester intermediate is resolved through a unique transformation: cyclization of the highly conserved C-terminal asparagine of the intein. This process is facilitated by the histidine (found in a highly conserved HNF motif) and the penultimate histidine and may also involve the aspartate. This succinimide formation reaction excises the intein from the reactive complex and leaves behind the exteins attached through a non-peptidic linkage. This structure rapidly rearranges into a stable peptide bond in an intein-independent fashion.

[0667] In some embodiments, an N-terminal fragment of a base editor (e.g., ABE, CBE) is fused to a split intein-N and a C-terminal fragment is fused to a split intein-C. These fragments are then packaged into two or more AAV vectors. The use of certain inteins for joining heterologous protein fragments is described, for example, in Wood et al., J. Biol. Chem. 289(21); 14512-9 (2014). For example, when fused to separate protein fragments, the inteins IntN and IntC recognize each other, splice themselves out and simultaneously ligate the flanking N- and C-terminal exteins of the protein fragments to which they were fused, thereby reconstituting a full-length protein from the two protein fragments. Other suitable inteins will be apparent to a person of skill in the art.

[0668] In some embodiments, an ABE was split into N- and C-terminal fragments at Ala, Ser, Thr, or Cys residues within selected regions of SpCas9. These regions correspond to loop regions identified by Cas9 crystal structure analysis. The N-terminus of each fragment is fused to an intein-N and the C-terminus of each fragment is fused to an intein C at amino acid positions S303, T310, T313, S355, A456, S460, A463, T466, S469, T472, T474, C574, S577, A589, and S590, which are indicated in Bold Capitals in the sequence below.

(SEQ ID NO: 1)

| | |
|---|---|
| 1 | mdkkysigld igtnsvgwav itdeykvpsk kfkvlgntdr |
| | hsikknliga llfdsgetae |
| 61 | atrlkrtarr rytrrknric ylqeifsnem akvddsffhr |
| | leesflveed kkherhpifg |
| 121 | nivdevayhe kyptiyhlrk klvdstdkad lrliylalah |
| | mikfrghfli egdlnpdnsd |
| 181 | vdklfiqlvq tynqlfeenp inasgvdaka ilsarlsksr |
| | rlenliaqlp gekknglfgn |
| 241 | lialslgltp nfksnfdlae daklqlskdt ydddldnlla |
| | qigdqyadlf laaknlsdai |
| 301 | llSdilrvnT eiTkaplsas mikrydehhq dltllkalvr |
| | qqlpekykei ffdqSkngya |
| 361 | gyidggasqe efykfikpil ekmdgteell vklnredllr |
| | kqrtfdngsi phqihlgelh |
| 421 | ailrrqedfy pflkdnreki ekiltfripy yvgplArgnS |
| | rfAwmTrkSe eTiTpwnfee |
| 481 | vvdkgasaqs fiermtnfdk nlpnekvlpk hsllyeyftv |
| | yneltkvkyv tegmrkpafl |
| 541 | sgeqkkaivd llfktnrkvt vkqlkedyfk kieCfdSvei |
| | sgvedrfnAS lgtyhdllki |
| 601 | ikdkdfldne enedilediv ltltlfedre mieerlktya |
| | hlfddkvmkq lkrrrytgwg |
| 661 | rlsrklingi rdkqsgktil dflksdgfan rnfmqlihdd |
| | sltfkediqk aqvsgqgdsl |
| 721 | hehianlags paikkgilqt vkvvdelvkv mgrhkpeniv |
| | iemarenqtt qkgqknsrer |
| 781 | mkrieegike lgsqilkehp ventqlqnek lylyylqngr |
| | dmyvdqeldi nrlsdydvdh |
| 841 | ivpqsflkdd sidnkvltrs dknrgksdnv pseevvkkmk |
| | nywrqllnak litqrkfdnl |
| 901 | tkaergglse ldkagfikrq lvetrqitkh vaqildsrmn |
| | tkydendkli revkvitlks |
| 961 | klvsdfrkdf qfykvreinn yhhandayln avvgtalikk |
| | ypklesefvy gdykvydvrk |
| 1021 | miakseqeig katakyffys nimnffktei tlangeirkr |
| | plietngetg eivwdkgrdf |
| 1081 | atvrkvlsmp qvnivkktev qtggfskesi lpkrnsdkli |
| | arkkdwdpkk yggfdsptva |
| 1141 | ysvlvvakve kgkskklksv kellgitime rssfeknpid |
| | fleakgykev kkdliiklpk |
| 1201 | yslfelengr krmlasagel qkgnelalps kyvnflylas |
| | hyeklkgspe dneqkqlfve |
| 1261 | qhkhyldeii eqisefskrv iladanldkv lsaynkhrdk |
| | pireqaenii hlftltnlga |
| 1321 | paafkyfdtt idrkrytstk evldatlihq sitglyetri |
| | dlsqlggd |

### Use of Nucleobase Editors to Target HBB Mutations

[0669] The suitability of nucleobase editors that target a HBB mutation is evaluated as described herein. In one embodiment, a single cell of interest (e.g., hematopoietic cells or their progenitors, hematopoietic stem cells, and/or induced pluripotent stem cells comprising a HBB mutation) is transduced with a base editing system together with a small amount of a vector encoding a reporter (e.g., GFP). These cells can be immortalized human cell lines, such as 293T, K562 or U20S. Alternatively, primary cells (e.g., human) may be used. Such cells may be relevant to the eventual cell target.

[0670] Delivery may be performed using a viral vector. In one embodiment, transfection may be performed using lipid transfection (such as Lipofectamine or Fugene) or by electroporation. Following transfection, expression of GFP can be determined either by fluorescence microscopy or by flow cytometry to confirm consistent and high levels of transfection. These preliminary transfections can comprise different nucleobase editors to determine which combinations of editors give the greatest activity.

[0671] The activity of the nucleobase editor is assessed as described herein, i.e., by sequencing the genome of the cells to detect alterations in a target sequence. For Sanger sequencing, purified PCR amplicons are cloned into a plasmid backbone, transformed, miniprepped and sequenced with a single primer. Sequencing may also be performed using next generation sequencing techniques. When using next generation sequencing, amplicons may be 300-500 bp with the intended cut site placed asymmetrically. Following PCR, next generation sequencing adapters and barcodes (for example Illumina multiplex adapters and indexes) may be added to the ends of the amplicon, e.g., for use in high throughput sequencing (for example on an Illumina MiSeq).

[0672] The fusion proteins that induce the greatest levels of target specific alterations in initial tests can be selected for further evaluation.

[0673] In particular embodiments, the nucleobase editors are used to target polynucleotides of interest. In one embodiment, a nucleobase editor of the invention is delivered to cells (e.g., hematopoietic cells or their progenitors, hematopoietic stem cells, and/or induced pluripotent stem cells) in conjunction with a guide RNA that is used to target a HBB mutation within the genome of a cell, thereby altering the HBB mutation.

[0674] The system can comprise one or more different vectors. In an aspect, the base editor is codon optimized for expression the desired cell type, preferentially a eukaryotic cell, preferably a mammalian cell or a human cell.

[0675] In general, codon optimization refers to a process of modifying a nucleic acid sequence for enhanced expression in the host cells of interest by replacing at least one codon (e.g. about or more than about 1, 2, 3, 4, 5, 10, 15, 20, 25, 50, or more codons) of the native sequence with codons that are more frequently or most frequently used in the genes of that host cell while maintaining the native amino acid sequence. Various species exhibit particular bias for certain codons of a particular amino acid. Codon bias (differences in codon usage between organisms) often correlates with the efficiency of translation of messenger RNA (mRNA), which is in turn believed to be dependent on, among other things, the properties of the codons being translated and the availability of particular transfer RNA (tRNA) molecules. The predominance of selected tRNAs in a cell is generally a reflection of the codons used most frequently in peptide synthesis. Accordingly, genes can be tailored for optimal gene expression in a given organism based on codon optimization. Codon usage tables are readily available, for example, at the “Codon Usage Database” available at www.kazusa.orjp/codon/ (visited Jul. 9, 2002), and these tables can be adapted in a number of ways. See, Nakamura, Y., et al. “Codon usage tabulated from the international DNA sequence databases: status for the year 2000” Nucl. Acids Res. 28:292 (2000). Computer algorithms for codon optimizing a particular sequence for expression in a particular host cell are also available, such as Gene Forge (Aptagen; Jacobus, Pa.), are also available. In some embodiments, one or more codons (e.g. 1, 2, 3, 4, 5, 10, 15, 20, 25, 50, or more, or all codons) in a sequence encoding an engineered nuclease correspond to the most frequently used codon for a particular amino acid.

[0676] Packaging cells are typically used to form virus particles that are capable of infecting a host cell. Such cells include 293 cells, which package adenovirus, and psi.2 cells or PA317 cells, which package retrovirus. Viral vectors used in gene therapy are usually generated by producing a cell line that packages a nucleic acid vector into a viral particle. The vectors typically contain the minimal viral sequences required for packaging and subsequent integration into a host, other viral sequences being replaced by an expression cassette for the polynucleotide(s) to be expressed. The missing viral functions are typically supplied in trans by the packaging cell line. For example, AAV vectors used in gene therapy typically only possess ITR sequences from the AAV genome which are required for packaging and integration into the host genome. Viral DNA can be packaged in a cell line, which contains a helper plasmid encoding the other AAV genes, namely rep and cap, but lacking ITR sequences. The cell line can also be infected with adenovirus as a helper. The helper virus can promote replication of the AAV vector and expression of AAV genes from the helper plasmid. The helper plasmid in some cases is not packaged in significant amounts due to a lack of ITR sequences. Contamination with adenovirus can be reduced by, e.g., heat treatment to which adenovirus is more sensitive than AAV.

### Pharmaceutical Compositions

[0677] Other aspects of the present disclosure relate to pharmaceutical compositions comprising any of the base editors, fusion proteins, or the fusion protein-guide polynucleotide complexes described herein. The term “pharmaceutical composition,” as used herein, refers to a composition formulated for pharmaceutical use. In some embodiments, the pharmaceutical composition further comprises a pharmaceutically acceptable carrier. In some embodiments, the pharmaceutical composition comprises additional agents (e.g., for specific delivery, increasing half-life, or other therapeutic compounds).

[0678] As used here, the term “pharmaceutically-acceptable carrier” means a pharmaceutically-acceptable material, composition or vehicle, such as a liquid or solid filler, diluent, excipient, manufacturing aid (e.g., lubricant, talc magnesium, calcium or zinc stearate, or steric acid), or solvent encapsulating material, involved in carrying or transporting the compound from one site (e.g., the delivery site) of the body, to another site (e.g., organ, tissue or portion of the body). A pharmaceutically acceptable carrier is “acceptable” in the sense of being compatible with the other ingredients of the formulation and not injurious to the tissue of the subject (e.g., physiologically compatible, sterile, physiologic pH, etc.).

[0679] Some nonlimiting examples of materials which can serve as pharmaceutically-acceptable carriers include: (1) sugars, such as lactose, glucose and sucrose; (2) starches, such as corn starch and potato starch; (3) cellulose, and its derivatives, such as sodium carboxymethyl cellulose, methylcellulose, ethyl cellulose, microcrystalline cellulose and cellulose acetate; (4) powdered tragacanth; (5) malt; (6) gelatin; (7) lubricating agents, such as magnesium stearate, sodium lauryl sulfate and talc; (8) excipients, such as cocoa butter and suppository waxes; (9) oils, such as peanut oil, cottonseed oil, safflower oil, sesame oil, olive oil, corn oil and soybean oil; (10) glycols, such as propylene glycol; (11) polyols, such as glycerin, sorbitol, mannitol and polyethylene glycol (PEG); (12) esters, such as ethyl oleate and ethyl laurate; (13) agar; (14) buffering agents, such as magnesium hydroxide and aluminum hydroxide; (15) alginic acid; (16) pyrogen-free water; (17) isotonic saline; (18) Ringer's solution; (19) ethyl alcohol; (20) pH buffered solutions; (21) polyesters, polycarbonates and/or polyanhydrides; (22) bulking agents, such as polypeptides and amino acids (23) serum alcohols, such as ethanol; and (23) other non-toxic compatible substances employed in pharmaceutical formulations. Wetting agents, coloring agents, release agents, coating agents, sweetening agents, flavoring agents, perfuming agents, preservative and antioxidants can also be present in the formulation. The terms such as “excipient,” “carrier,” “pharmaceutically acceptable carrier,” “vehicle” or the like are used interchangeably herein.

[0680] Pharmaceutical compositions can comprise one or more pH buffering compounds to maintain the pH of the formulation at a predetermined level that reflects physiological pH, such as in the range of about 5.0 to about 8.0. The pH buffering compound used in the aqueous liquid formulation can be an amino acid or mixture of amino acids, such as histidine or a mixture of amino acids such as histidine and glycine. Alternatively, the pH buffering compound is preferably an agent which maintains the pH of the formulation at a predetermined level, such as in the range of about 5.0 to about 8.0, and which does not chelate calcium ions. Illustrative examples of such pH buffering compounds include, but are not limited to, imidazole and acetate ions. The pH buffering compound may be present in any amount suitable to maintain the pH of the formulation at a predetermined level.

[0681] Pharmaceutical compositions can also contain one or more osmotic modulating agents, i.e., a compound that modulates the osmotic properties (e.g., tonicity, osmolality, and/or osmotic pressure) of the formulation to a level that is acceptable to the blood stream and blood cells of recipient individuals. The osmotic modulating agent can be an agent that does not chelate calcium ions. The osmotic modulating agent can be any compound known or available to those skilled in the art that modulates the osmotic properties of the formulation. One skilled in the art may empirically determine the suitability of a given osmotic modulating agent for use in the inventive formulation. Illustrative examples of suitable types of osmotic modulating agents include, but are not limited to: salts, such as sodium chloride and sodium acetate; sugars, such as sucrose, dextrose, and mannitol; amino acids, such as glycine; and mixtures of one or more of these agents and/or types of agents. The osmotic modulating agent(s) may be present in any concentration sufficient to modulate the osmotic properties of the formulation.

[0682] In some embodiments, the pharmaceutical composition is formulated for delivery to a subject, e.g., for gene editing. Suitable routes of administrating the pharmaceutical composition described herein include, without limitation: topical, subcutaneous, transdermal, intradermal, intralesional, intraarticular, intraperitoneal, intravesical, transmucosal, gingival, intradental, intracochlear, transtympanic, intraorgan, epidural, intrathecal, intramuscular, intravenous, intravascular, intraosseus, periocular, intratumoral, intracerebral, and intracerebroventricular administration.

[0683] In some embodiments, the pharmaceutical composition described herein is administered locally to a diseased site (e.g., tumor site). In some embodiments, the pharmaceutical composition described herein is administered to a subject by injection, by means of a catheter, by means of a suppository, or by means of an implant, the implant being of a porous, non-porous, or gelatinous material, including a membrane, such as a sialastic membrane, or a fiber.

[0684] In other embodiments, the pharmaceutical composition described herein is delivered in a controlled release system. In one embodiment, a pump can be used (see, e.g., Langer, 1990, Science 249: 1527-1533; Sefton, 1989, CRC Crit. Ref. Biomed. Eng. 14:201; Buchwald et al., 1980, Surgery 88:507; Saudek et al, 1989, N. Engl. J. Med. 321:574). In another embodiment, polymeric materials can be used. (See, e.g., Medical Applications of Controlled Release (Langer and Wise eds., CRC Press, Boca Raton, Fla., 1974); Controlled Drug Bioavailability, Drug Product Design and Performance (Smolen and Ball eds., Wiley, New York, 1984); Ranger and Peppas, 1983, Macromol. Sci. Rev. Macromol. Chem. 23:61. See also Levy et al., 1985, Science 228: 190; During et al., 1989, Ann. Neurol. 25:351; Howard et ah, 1989, J. Neurosurg. 71: 105.) Other controlled release systems are discussed, for example, in Langer, supra.

[0685] In some embodiments, the pharmaceutical composition is formulated in accordance with routine procedures as a composition adapted for intravenous or subcutaneous administration to a subject, e.g., a human. In some embodiments, pharmaceutical composition for administration by injection are solutions in sterile isotonic use as solubilizing agent and a local anesthetic such as lignocaine to ease pain at the site of the injection. Generally, the ingredients are supplied either separately or mixed together in unit dosage form, for example, as a dry lyophilized powder or water free concentrate in a hermetically sealed container such as an ampoule or sachette indicating the quantity of active agent. Where the pharmaceutical is to be administered by infusion, it can be dispensed with an infusion bottle containing sterile pharmaceutical grade water or saline. Where the pharmaceutical composition is administered by injection, an ampoule of sterile water for injection or saline can be provided so that the ingredients can be mixed prior to administration.

[0686] A pharmaceutical composition for systemic administration can be a liquid, e.g., sterile saline, lactated Ringer's or Hank's solution. In addition, the pharmaceutical composition can be in solid forms and re-dissolved or suspended immediately prior to use. Lyophilized forms are also contemplated. The pharmaceutical composition can be contained within a lipid particle or vesicle, such as a liposome or microcrystal, which is also suitable for parenteral administration. The particles can be of any suitable structure, such as unilamellar or plurilamellar, so long as compositions are contained therein. Compounds can be entrapped in “stabilized plasmid-lipid particles” (SPLP) containing the fusogenic lipid dioleoylphosphatidylethanolamine (DOPE), low levels (5-10 mol %) of cationic lipid, and stabilized by a polyethyleneglycol (PEG) coating (Zhang Y. P. et ah, Gene Ther. 1999, 6: 1438-47). Positively charged lipids such as N-[1-(2,3-dioleoyloxi)propyl]-N,N,N-trimethyl-amoniummethylsulfate, or “DOTAP,” are particularly preferred for such particles and vesicles. The preparation of such lipid particles is well known. See, e.g., U.S. Pat. Nos. 4,880,635; 4,906,477; 4,911,928; 4,917,951; 4,920,016; and 4,921,757; each of which is incorporated herein by reference.

[0687] The pharmaceutical composition described herein can be administered or packaged as a unit dose, for example. The term “unit dose” when used in reference to a pharmaceutical composition of the present disclosure refers to physically discrete units suitable as unitary dosage for the subject, each unit containing a predetermined quantity of active material calculated to produce the desired therapeutic effect in association with the required diluent; i.e., carrier, or vehicle.

[0688] Further, the pharmaceutical composition can be provided as a pharmaceutical kit comprising (a) a container containing a compound of the invention in lyophilized form and (b) a second container containing a pharmaceutically acceptable diluent (e.g., sterile used for reconstitution or dilution of the lyophilized compound of the invention. Optionally associated with such container(s) can be a notice in the form prescribed by a governmental agency regulating the manufacture, use or sale of pharmaceuticals or biological products, which notice reflects approval by the agency of manufacture, use or sale for human administration.

[0689] In another aspect, an article of manufacture containing materials useful for the treatment of the diseases described above is included. In some embodiments, the article of manufacture comprises a container and a label. Suitable containers include, for example, bottles, vials, syringes, and test tubes. The containers can be formed from a variety of materials such as glass or plastic. In some embodiments, the container holds a composition that is effective for treating a disease described herein and can have a sterile access port. For example, the container can be an intravenous solution bag or a vial having a stopper pierceable by a hypodermic injection needle. The active agent in the composition is a compound of the invention. In some embodiments, the label on or associated with the container indicates that the composition is used for treating the disease of choice. The article of manufacture can further comprise a second container comprising a pharmaceutically-acceptable buffer, such as phosphate-buffered saline, Ringer's solution, or dextrose solution. It can further include other materials desirable from a commercial and user standpoint, including other buffers, diluents, filters, needles, syringes, and package inserts with instructions for use.

[0690] In some embodiments, any of the fusion proteins, gRNAs, and/or complexes described herein are provided as part of a pharmaceutical composition. In some embodiments, the pharmaceutical composition comprises any of the fusion proteins provided herein. In some embodiments, the pharmaceutical composition comprises any of the complexes provided herein. In some embodiments, the pharmaceutical composition comprises a ribonucleoprotein complex comprising an RNA-guided nuclease (e.g., Cas9) that forms a complex with a gRNA and a cationic lipid. In some embodiments pharmaceutical composition comprises a gRNA, a nucleic acid programmable DNA binding protein, a cationic lipid, and a pharmaceutically acceptable excipient. Pharmaceutical compositions can optionally comprise one or more additional therapeutically active substances.

[0691] In some embodiments, compositions provided herein are administered to a subject, for example, to a human subject, in order to effect a targeted genomic modification within the subject. In some embodiments, cells are obtained from the subject and contacted with any of the pharmaceutical compositions provided herein. In some embodiments, cells removed from a subject and contacted ex vivo with a pharmaceutical composition are re-introduced into the subject, optionally after the desired genomic modification has been effected or detected in the cells. Methods of delivering pharmaceutical compositions comprising nucleases are known, and are described, for example, in U.S. Pat. Nos. 6,453,242; 6,503,717; 6,534,261; 6,599,692; 6,607,882; 6,689,558; 6,824,978; 6,933,113; 6,979,539; 7,013,219; and 7,163,824, the disclosures of all of which are incorporated by reference herein in their entireties. Although the descriptions of pharmaceutical compositions provided herein are principally directed to pharmaceutical compositions which are suitable for administration to humans, it will be understood by the skilled artisan that such compositions are generally suitable for administration to animals or organisms of all sorts, for example, for veterinary use.

[0692] Modification of pharmaceutical compositions suitable for administration to humans in order to render the compositions suitable for administration to various animals is well understood, and the ordinarily skilled veterinary pharmacologist can design and/or perform such modification with merely ordinary, if any, experimentation. Subjects to which administration of the pharmaceutical compositions is contemplated include, but are not limited to, humans and/or other primates; mammals, domesticated animals, pets, and commercially relevant mammals such as cattle, pigs, horses, sheep, cats, dogs, mice, and/or rats; and/or birds, including commercially relevant birds such as chickens, ducks, geese, and/or turkeys.

[0693] Formulations of the pharmaceutical compositions described herein can be prepared by any method known or hereafter developed in the art of pharmacology. In general, such preparatory methods include the step of bringing the active ingredient(s) into association with an excipient and/or one or more other accessory ingredients, and then, if necessary and/or desirable, shaping and/or packaging the product into a desired single- or multi-dose unit. Pharmaceutical formulations can additionally comprise a pharmaceutically acceptable excipient, which, as used herein, includes any and all solvents, dispersion media, diluents, or other liquid vehicles, dispersion or suspension aids, surface active agents, isotonic agents, thickening or emulsifying agents, preservatives, solid binders, lubricants and the like, as suited to the particular dosage form desired. Remington's The Science and Practice of Pharmacy, 21st Edition, A. R. Gennaro (Lippincott, Williams & Wilkins, Baltimore, Md., 2006; incorporated in its entirety herein by reference) discloses various excipients used in formulating pharmaceutical compositions and known techniques for the preparation thereof. See also PCT application PCT/US2010/055131 (Publication number WO2011/053982 A8, filed Nov. 2, 2010), incorporated in its entirety herein by reference, for additional suitable methods, reagents, excipients and solvents for producing pharmaceutical compositions comprising a nuclease.

[0694] Except insofar as any conventional excipient medium is incompatible with a substance or its derivatives, such as by producing any undesirable biological effect or otherwise interacting in a deleterious manner with any other component(s) of the pharmaceutical composition, its use is contemplated to be within the scope of this disclosure.

[0695] The compositions, as described above, can be administered in effective amounts. The effective amount will depend upon the mode of administration, the particular condition being treated, and the desired outcome. It may also depend upon the stage of the condition, the age and physical condition of the subject, the nature of concurrent therapy, if any, and like factors well-known to the medical practitioner. For therapeutic applications, it is that amount sufficient to achieve a medically desirable result.

[0696] In some embodiments, compositions in accordance with the present disclosure can be used for treatment of any of a variety of diseases, disorders, and/or conditions. In some embodiments the compositions can be used for treatment of SCD and symptoms thereof

### Kits

[0697] Various aspects of this disclosure provide kits comprising a base editor system. In one embodiment, the kit comprises a nucleic acid construct comprising a nucleotide sequence encoding a nucleobase editor fusion protein. The fusion protein comprises a deaminase (e.g., adenosine deaminase) and a nucleic acid programmable DNA binding protein (napDNAbp). In some embodiments, the kit comprises at least one guide RNA capable of targeting the HBB. In some embodiments, the kit comprises a nucleic acid construct comprising a nucleotide sequence encoding at least one guide RNA capable of targeting the HBB.

[0698] The kit provides, in some embodiments, instructions for using the kit to edit one or more mutations (e.g., mutations in HBB). The instructions will generally include information about the use of the kit for editing nucleic acid molecules. In other embodiments, the instructions include at least one of the following: precautions; warnings; clinical studies; and/or references. The instructions may be printed directly on the container (when present), or as a label applied to the container, or as a separate sheet, pamphlet, card, or folder supplied in or with the container. In a further embodiment, a kit can comprise instructions in the form of a label or separate insert (package insert) for suitable operational parameters. In yet another embodiment, the kit can comprise one or more containers with appropriate positive and negative controls or control samples, to be used as standard(s) for detection, calibration, or normalization. The kit can further comprise a second container comprising a pharmaceutically-acceptable buffer, such as (sterile) phosphate-buffered saline, Ringer's solution, or dextrose solution. It can further include other materials desirable from a commercial and user standpoint, including other buffers, diluents, filters, needles, syringes, and package inserts with instructions for use.

Fusion Proteins with Internal Insertions

[0699] Provided herein are fusion proteins comprising a heterologous polypeptide fused to a nucleic acid programmable nucleic acid binding protein, for example, a napDNAbp. A heterologous polypeptide can be a polypeptide that is not found in the native or wild-type napDNAbp polypeptide sequence. The heterologous polypeptide can be fused to the napDNAbp at a C-terminal end of the napDNAbp, an N-terminal end of the napDNAbp, or inserted at an internal location of the napDNAbp. In some embodiments, the heterologous polypeptide is inserted at an internal location of the napDNAbp.

[0700] In some embodiments, the heterologous polypeptide is a deaminase or a functional fragment thereof. For example, a fusion protein can comprise a deaminase flanked by an N-terminal fragment and a C-terminal fragment of a Cas9 or Cas12 (e.g., Cas12b/C2c1), polypeptide. The deaminase in a fusion protein can be an adenosine deaminase. In some embodiments, the adenosine deaminase is a TadA (e.g., TadA7.10 or TadA*8). In some embodiments, the TadA is a TadA*8. TadA sequences (e.g., TadA7.10 or TadA*8) as described herein are suitable deaminases for the above-described fusion proteins.

[0701] The deaminase can be a circular permutant deaminase. For example, the deaminase can be a circular permutant adenosine deaminase. In some embodiments, the deaminase is a circular permutant TadA, circularly permutated at amino acid residue 116 as numbered in the TadA reference sequence. In some embodiments, the deaminase is a circular permutant TadA, circularly permutated at amino acid residue 136 as numbered in the TadA reference sequence. In some embodiments, the deaminase is a circular permutant TadA, circularly permutated at amino acid residue 65 as numbered in the TadA reference sequence.

[0702] The fusion protein can comprise more than one deaminase. The fusion protein can comprise, for example, 1, 2, 3, 4, 5 or more deaminases. In some embodiments, the fusion protein comprises one deaminase. In some embodiments, the fusion protein comprises two deaminases. The two or more deaminases in a fusion protein can be an adenosine deaminase. cytidine deaminase, or a combination thereof, e.g., as described in PCT/US19/44935. The two or more deaminases can be homodimers. The two or more deaminases can be heterodimers. The two or more deaminases can be inserted in tandem in the napDNAbp. In some embodiments, the two or more deaminases may not be in tandem in the napDNAbp.

[0703] In some embodiments, the napDNAbp in the fusion protein is a Cas9 polypeptide or a fragment thereof. The Cas9 polypeptide can be a variant Cas9 polypeptide. In some embodiments, the Cas9 polypeptide is a Cas9 nickase (nCas9) polypeptide or a fragment thereof. In some embodiments, the Cas9 polypeptide is a nuclease dead Cas9 (dCas9) polypeptide or a fragment thereof. The Cas9 polypeptide in a fusion protein can be a full-length Cas9 polypeptide. In some cases, the Cas9 polypeptide in a fusion protein may not be a full length Cas9 polypeptide. The Cas9 polypeptide can be truncated, for example, at a N-terminal or C-terminal end relative to a naturally-occurring Cas9 protein. The Cas9 polypeptide can be a circularly permuted Cas9 protein. The Cas9 polypeptide can be a fragment, a portion, or a domain of a Cas9 polypeptide, that is still capable of binding the target polynucleotide and a guide nucleic acid sequence.

[0704] In some embodiments, the Cas9 polypeptide is a Streptococcus pyogenes Cas9 (SpCas9), Staphylococcus aureus Cas9 (SaCas9), Streptococcus thermophilus 1 Cas9 (St1Cas9), or fragments or variants thereof

[0705] The Cas9 polypeptide of a fusion protein can comprise an amino acid sequence that is at least 85%, at least 90%, at least 91%, at least 92%, at least 93%, at least 94%, at least 95%, at least 96%, at least 97%, at least 98%, at least 99%, or at least 99.5% identical to a naturally-occurring Cas9 polypeptide.

[0706] The Cas9 polypeptide of a fusion protein can comprise an amino acid sequence that is at least 85%, at least 90%, at least 91%, at least 92%, at least 93%, at least 94%, at least 95%, at least 96%, at least 97%, at least 98%, at least 99%, or at least 99.5% identical to the Cas9 amino acid sequence set forth below (called the “Cas9 reference sequence” below):

(SEQ ID NO: 1)
MDKKYSIGLDIGTNSVGWAVITDEYKVPSKKFKVLGNTDRHSIKKNLIGALLFDSGETAEATRLKRTARR
RYTRRKNRICYLQEIFSNEMAKVDDSFFHRLEESFLVEEDKKHERHPIFGNIVDEVAYHEKYPTIYHLRK
KLVDSTDKADLRLIYLALAHMIKFRGHFLIEGDLNPDNSDVDKLFIQLVQTYNQLFEENPINASGVDAKA
ILSARLSKSRRLENLIAQLPGEKKNGLFGNLIALSLGLTPNFKSNFDLAEDAKLQLSKDTYDDDLDNLLA
QIGDQYADLFLAAKNLSDAILLSDILRVNTEITKAPLSASMIKRYDEHHQDLTLLKALVRQQLPEKYKEI
FFDQSKNGYAGYIDGGASQEEFYKFIKPILEKMDGTEELLVKLNREDLLRKQRTFDNGSIPHQIHLGELH
AILRRQEDFYPFLKDNREKIEKILTFRIPYYVGPLARGNSRFAWMTRKSEETITPWNFEEVVDKGASAQS
FIERMTNFDKNLPNEKVLPKHSLLYEYFTVYNELTKVKYVTEGMRKPAFLSGEQKKAIVDLLFKTNRKVT
VKQLKEDYFKKIECFDSVEISGVEDRFNASLGTYHDLLKIIKDKDFLDNEENEDILEDIVLTLTLFEDRE
MIEERLKTYAHLFDDKVMKQLKRRRYTGWGRLSRKLINGIRDKQSGKTILDFLKSDGFANRNFMQLIHDD
SLTFKEDIQKAQVSGQGDSLHEHIANLAGSPAIKKGILQTVKVVDELVKVMGRHKPENIVIEMARENQTT
QKGQKNSRERMKRIEEGIKELGSQILKEHPVENTQLQNEKLYLYYLQNGRDMYVDQELDINRLSDYDVDH
IVPQSFLKDDSIDNKVLTRSDKNRGKSDNVPSEEVVKKMKNYWRQLLNAKLITQRKFDNLTKAERGGLSE
LDKAGFIKRQLVETRQITKHVAQILDSRMNTKYDENDKLIREVKVITLKSKLVSDFRKDFQFYKVREINN
YHHAHDAYLNAVVGTALIKKYPKLESEFVYGDYKVYDVRKMIAKSEQEIGKATAKYFFYSNIMNFFKTEI
TLANGEIRKRPLIETNGETGEIVWDKGRDFATVRKVLSMPQVNIVKKTEVQTGGFSKESILPKRNSDKLI
ARKKDWDPKKYGGFDSPTVAYSVLVVAKVEKGKSKKLKSVKELLGITIMERSSFEKNPIDFLEAKGYKEV
KKDLIIKLPKYSLFELENGRKRMLASAGELQKGNELALPSKYVNFLYLASHYEKLKGSPEDNEQKQLFVE
QHKHYLDEIIEQISEFSKRVILADANLDKVLSAYNKHRDKPIREQAENIIHLFTLTNLGAPAAFKYFDTT
IDRKRYTSTKEVLDATLIHQSITGLYETRIDLSQLGGD (single underline: HNH
domain; double underline: RuvC domain)

[0707] In some embodiments, the napDNAbp in the fusion protein is a Cas12 polypeptide, e.g., Cas12b/C2c1, or a fragment thereof. The Cas12 polypeptide can be a variant Cas12 polypeptide.

[0708] The heterologous polypeptide (e.g., deaminase) can be inserted in the napDNAbp (e.g., Cas9 or Cas12 (e.g., Cas12b/C2c1)) at a suitable location, for example, such that the napDNAbp retains its ability to bind the target polynucleotide and a guide nucleic acid. A deaminase (e.g., adenosine deaminase) can be inserted into a napDNAbp without compromising function of the deaminase (e.g., base editing activity) or the napDNAbp (e.g., ability to bind to target nucleic acid and guide nucleic acid). A deaminase (e.g., adenosine deaminase) can be inserted in the napDNAbp at, for example, a disordered region or a region comprising a high temperature factor or B-factor as shown by crystallographic studies. Regions of a protein that are less ordered, disordered, or unstructured, for example solvent exposed regions and loops, can be used for insertion without compromising structure or function. A deaminase (e.g., adenosine deaminase) can be inserted in the napDNAbp in a flexible loop region or a solvent-exposed region. In some embodiments, the deaminase (e.g., adenosine deaminase) is inserted in a flexible loop of the Cas9 or the Cas12b/C2c1 polypeptide.

[0709] In some embodiments, the insertion location of a deaminase (e.g., adenosine deaminase) is determined by B-factor analysis of the crystal structure of Cas9 polypeptide. In some embodiments, the deaminase (e.g., adenosine deaminase) is inserted in regions of the Cas9 polypeptide comprising higher than average B-factors (e.g., higher B factors compared to the total protein or the protein domain comprising the disordered region). B-factor or temperature factor can indicate the fluctuation of atoms from their average position (for example, as a result of temperature-dependent atomic vibrations or static disorder in a crystal lattice). A high B-factor (e.g., higher than average B-factor) for backbone atoms can be indicative of a region with relatively high local mobility. Such a region can be used for inserting a deaminase without compromising structure or function. A deaminase (e.g., adenosine deaminase) can be inserted at a location with a residue having a Ca atom with a B-factor that is 50%, 60%, 70%, 80%, 90%, 100%, 110%, 120%, 130%, 140%, 150%, 160%, 170%, 180%, 190%, 200%, or greater than 200% more than the average B-factor for the total protein. A deaminase (e.g., adenosine deaminase) can be inserted at a location with a residue having a Ca atom with a B-factor that is 50%, 60%, 70%, 80%, 90%, 100%, 110%, 120%, 130%, 140%, 150%, 160%, 170%, 180%, 190%, 200% or greater than 200% more than the average B-factor for a Cas9 protein domain comprising the residue. Cas9 polypeptide positions comprising a higher than average B-factor can include, for example, residues 768, 792, 1052, 1015, 1022, 1026, 1029, 1067, 1040, 1054, 1068, 1246, 1247, and 1248 as numbered in the above Cas9 reference sequence. Cas9 polypeptide regions comprising a higher than average B-factor can include, for example, residues 792-872, 792-906, and 2-791 as numbered in the above Cas9 reference sequence.

[0710] A heterologous polypeptide (e.g., deaminase) can be inserted in the napDNAbp at an amino acid residue selected from the group consisting of: 768, 791, 792, 1015, 1016, 1022, 1023, 1026, 1029, 1040, 1052, 1054, 1067, 1068, 1069, 1246, 1247, and 1248 as numbered in the above Cas9 reference sequence, or a corresponding amino acid residue in another Cas9 polypeptide. In some embodiments, the heterologous polypeptide is inserted between amino acid positions 768-769, 791-792, 792-793, 1015-1016, 1022-1023, 1026-1027, 1029-1030, 1040-1041, 1052-1053, 1054-1055, 1067-1068, 1068-1069, 1247-1248, or 1248-1249 as numbered in the above Cas9 reference sequence or corresponding amino acid positions thereof. In some embodiments, the heterologous polypeptide is inserted between amino acid positions 769-770, 792-793, 793-794, 1016-1017, 1023-1024, 1027-1028, 1030-1031, 1041-1042, 1053-1054, 1055-1056, 1068-1069, 1069-1070, 1248-1249, or 1249-1250 as numbered in the above Cas9 reference sequence or corresponding amino acid positions thereof. In some embodiments, the heterologous polypeptide replaces an amino acid residue selected from the group consisting of: 768, 791, 792, 1015, 1016, 1022, 1023, 1026, 1029, 1040, 1052, 1054, 1067, 1068, 1069, 1246, 1247, and 1248 as numbered in the above Cas9 reference sequence, or a corresponding amino acid residue in another Cas9 polypeptide. It should be understood that the reference to the above Cas9 reference sequence with respect to insertion positions is for illustrative purposes. The insertions as discussed herein are not limited to the Cas9 polypeptide sequence of the above Cas9 reference sequence, but include insertion at corresponding locations in variant Cas9 polypeptides, for example a Cas9 nickase (nCas9), nuclease dead Cas9 (dCas9), a Cas9 variant lacking a nuclease domain, a truncated Cas9, or a Cas9 domain lacking partial or complete HNH domain.

[0711] A heterologous polypeptide (e.g., deaminase) can be inserted in the napDNAbp at an amino acid residue selected from the group consisting of: 768, 792, 1022, 1026, 1040, 1068, and 1247 as numbered in the above Cas9 reference sequence, or a corresponding amino acid residue in another Cas9 polypeptide. In some embodiments, the heterologous polypeptide is inserted between amino acid positions 768-769, 792-793, 1022-1023, 1026-1027, 1029-1030, 1040-1041, 1068-1069, or 1247-1248 as numbered in the above Cas9 reference sequence or corresponding amino acid positions thereof. In some embodiments, the heterologous polypeptide is inserted between amino acid positions 769-770, 793-794, 1023-1024, 1027-1028, 1030-1031, 1041-1042, 1069-1070, or 1248-1249 as numbered in the above Cas9 reference sequence or corresponding amino acid positions thereof. In some embodiments, the heterologous polypeptide replaces an amino acid residue selected from the group consisting of: 768, 792, 1022, 1026, 1040, 1068, and 1247 as numbered in the above Cas9 reference sequence, or a corresponding amino acid residue in another Cas9 polypeptide.

[0712] A heterologous polypeptide (e.g., deaminase) can be inserted in the napDNAbp at an amino acid residue as described herein, or a corresponding amino acid residue in another Cas9 polypeptide. In an embodiment, a heterologous polypeptide (e.g., deaminase) can be inserted in the napDNAbp at an amino acid residue selected from the group consisting of: 1002, 1003, 1025, 1052-1056, 1242-1247, 1061-1077, 943-947, 686-691, 569-578, 530-539, and 1060-1077 as numbered in the above Cas9 reference sequence, or a corresponding amino acid residue in another Cas9 polypeptide. The deaminase (e.g., adenosine deaminase) can be inserted at the N-terminus or the C-terminus of the residue or replace the residue. In some embodiments, the deaminase (e.g., adenosine deaminase) is inserted at the C-terminus of the residue.

[0713] In some embodiments, an adenosine deaminase (e.g., TadA) is inserted at an amino acid residue selected from the group consisting of: 1015, 1022, 1029, 1040, 1068, 1247, 1054, 1026, 768, 1067, 1248, 1052, and 1246 as numbered in the above Cas9 reference sequence, or a corresponding amino acid residue in another Cas9 polypeptide. In some embodiments, an adenosine deaminase (e.g., TadA) is inserted in place of residues 792-872, 792-906, or 2-791 as numbered in the above Cas9 reference sequence, or a corresponding amino acid residue in another Cas9 polypeptide. In some embodiments, the adenosine deaminase is inserted at the N-terminus of an amino acid selected from the group consisting of: 1015, 1022, 1029, 1040, 1068, 1247, 1054, 1026, 768, 1067, 1248, 1052, and 1246 as numbered in the above Cas9 reference sequence, or a corresponding amino acid residue in another Cas9 polypeptide. In some embodiments, the adenosine deaminase is inserted at the C-terminus of an amino acid selected from the group consisting of: 1015, 1022, 1029, 1040, 1068, 1247, 1054, 1026, 768, 1067, 1248, 1052, and 1246 as numbered in the above Cas9 reference sequence, or a corresponding amino acid residue in another Cas9 polypeptide. In some embodiments, the adenosine deaminase is inserted to replace an amino acid selected from the group consisting of: 1015, 1022, 1029, 1040, 1068, 1247, 1054, 1026, 768, 1067, 1248, 1052, and 1246 as numbered in the above Cas9 reference sequence, or a corresponding amino acid residue in another Cas9 polypeptide.

[0714] In some embodiments, the deaminase (e.g., adenosine deaminase) is inserted at amino acid residue 768 as numbered in the above Cas9 reference sequence, or a corresponding amino acid residue in another Cas9 polypeptide. In some embodiments, the deaminase (e.g., adenosine deaminase) is inserted at the N-terminus of amino acid residue 768 as numbered in the above Cas9 reference sequence, or a corresponding amino acid residue in another Cas9 polypeptide. In some embodiments, the deaminase (e.g., adenosine deaminase) is inserted at the C-terminus of amino acid residue 768 as numbered in the above Cas9 reference sequence, or a corresponding amino acid residue in another Cas9 polypeptide. In some embodiments, the deaminase (e.g., adenosine deaminase) is inserted to replace amino acid residue 768 as numbered in the above Cas9 reference sequence, or a corresponding amino acid residue in another Cas9 polypeptide.

[0715] In some embodiments, the deaminase (e.g., adenosine deaminase) is inserted at amino acid residue 791 or is inserted at amino acid residue 792, as numbered in the above Cas9 reference sequence, or a corresponding amino acid residue in another Cas9 polypeptide. In some embodiments, the deaminase (e.g., adenosine deaminase) is inserted at the N-terminus of amino acid residue 791 or is inserted at the N-terminus of amino acid 792, as numbered in the above Cas9 reference sequence, or a corresponding amino acid residue in another Cas9 polypeptide. In some embodiments, the deaminase (e.g., adenosine deaminase) is inserted at the C-terminus of amino acid 791 or is inserted at the N-terminus of amino acid 792, as numbered in the above Cas9 reference sequence, or a corresponding amino acid residue in another Cas9 polypeptide. In some embodiments, the deaminase (e.g., adenosine deaminase) is inserted to replace amino acid 791, or is inserted to replace amino acid 792, as numbered in the above Cas9 reference sequence, or a corresponding amino acid residue in another Cas9 polypeptide.

[0716] In some embodiments, the deaminase (e.g., adenosine deaminase) is inserted at amino acid residue 1016 as numbered in the above Cas9 reference sequence, or a corresponding amino acid residue in another Cas9 polypeptide. In some embodiments, the deaminase (e.g., adenosine deaminase) is inserted at the N-terminus of amino acid residue 1016 as numbered in the above Cas9 reference sequence, or a corresponding amino acid residue in another Cas9 polypeptide. In some embodiments, the deaminase (e.g., adenosine deaminase) is inserted at the C-terminus of amino acid residue 1016 as numbered in the above Cas9 reference sequence, or a corresponding amino acid residue in another Cas9 polypeptide. In some embodiments, the deaminase (e.g., adenosine deaminase) is inserted to replace amino acid residue 1016 as numbered in the above Cas9 reference sequence, or a corresponding amino acid residue in another Cas9 polypeptide.

[0717] In some embodiments, the deaminase (e.g., adenosine deaminase) is inserted at amino acid residue 1022, or is inserted at amino acid residue 1023, as numbered in the above Cas9 reference sequence, or a corresponding amino acid residue in another Cas9 polypeptide. In some embodiments, the deaminase (e.g., adenosine deaminase) is inserted at the N-terminus of amino acid residue 1022 or is inserted at the N-terminus of amino acid residue 1023, as numbered in the above Cas9 reference sequence, or a corresponding amino acid residue in another Cas9 polypeptide. In some embodiments, the deaminase (e.g., adenosine deaminase) is inserted at the C-terminus of amino acid residue 1022 or is inserted at the C-terminus of amino acid residue 1023, as numbered in the above Cas9 reference sequence, or a corresponding amino acid residue in another Cas9 polypeptide. In some embodiments, the deaminase (e.g., adenosine deaminase) is inserted to replace amino acid residue 1022, or is inserted to replace amino acid residue 1023, as numbered in the above Cas9 reference sequence, or a corresponding amino acid residue in another Cas9 polypeptide.

[0718] In some embodiments, the deaminase (e.g., adenosine deaminase) is inserted at amino acid residue 1026, or is inserted at amino acid residue 1029, as numbered in the above Cas9 reference sequence, or a corresponding amino acid residue in another Cas9 polypeptide. In some embodiments, the deaminase (e.g., adenosine deaminase) is inserted at the N-terminus of amino acid residue 1026 or is inserted at the N-terminus of amino acid residue 1029, as numbered in the above Cas9 reference sequence, or a corresponding amino acid residue in another Cas9 polypeptide. In some embodiments, the deaminase (e.g., adenosine deaminase) is inserted at the C-terminus of amino acid residue 1026 or is inserted at the C-terminus of amino acid residue 1029, as numbered in the above Cas9 reference sequence, or a corresponding amino acid residue in another Cas9 polypeptide. In some embodiments, the deaminase (e.g., adenosine deaminase) is inserted to replace amino acid residue 1026, or is inserted to replace amino acid residue 1029, as numbered in the above Cas9 reference sequence, or corresponding amino acid residue in another Cas9 polypeptide.

[0719] In some embodiments, the deaminase (e.g., adenosine deaminase) is inserted at amino acid residue 1040 as numbered in the above Cas9 reference sequence, or a corresponding amino acid residue in another Cas9 polypeptide. In some embodiments, the deaminase (e.g., adenosine deaminase) is inserted at the N-terminus of amino acid residue 1040 as numbered in the above Cas9 reference sequence, or a corresponding amino acid residue in another Cas9 polypeptide. In some embodiments, the deaminase (e.g., adenosine deaminase) is inserted at the C-terminus of amino acid residue 1040 as numbered in the above Cas9 reference sequence, or a corresponding amino acid residue in another Cas9 polypeptide. In some embodiments, the deaminase (e.g., adenosine deaminase) is inserted to replace amino acid residue 1040 as numbered in the above Cas9 reference sequence, or a corresponding amino acid residue in another Cas9 polypeptide.

[0720] In some embodiments, the deaminase (e.g., adenosine deaminase) is inserted at amino acid residue 1052, or is inserted at amino acid residue 1054, as numbered in the above Cas9 reference sequence, or a corresponding amino acid residue in another Cas9 polypeptide. In some embodiments, the deaminase (e.g., adenosine deaminase) is inserted at the N-terminus of amino acid residue 1052 or is inserted at the N-terminus of amino acid residue 1054, as numbered in the above Cas9 reference sequence, or a corresponding amino acid residue in another Cas9 polypeptide. In some embodiments, the deaminase (e.g., adenosine deaminase) is inserted at the C-terminus of amino acid residue 1052 or is inserted at the C-terminus of amino acid residue 1054, as numbered in the above Cas9 reference sequence, or a corresponding amino acid residue in another Cas9 polypeptide. In some embodiments, the deaminase (e.g., adenosine deaminase) is inserted to replace amino acid residue 1052, or is inserted to replace amino acid residue 1054, as numbered in the above Cas9 reference sequence, or a corresponding amino acid residue in another Cas9 polypeptide.

[0721] In some embodiments, the deaminase (e.g., adenosine deaminase) is inserted at amino acid residue 1067, or is inserted at amino acid residue 1068, or is inserted at amino acid residue 1069, as numbered in the above Cas9 reference sequence, or a corresponding amino acid residue in another Cas9 polypeptide. In some embodiments, the deaminase (e.g., adenosine deaminase) is inserted at the N-terminus of amino acid residue 1067 or is inserted at the N-terminus of amino acid residue 1068 or is inserted at the N-terminus of amino acid residue 1069, as numbered in the above Cas9 reference sequence, or a corresponding amino acid residue in another Cas9 polypeptide. In some embodiments, the deaminase (e.g., adenosine deaminase) is inserted at the C-terminus of amino acid residue 1067 or is inserted at the C-terminus of amino acid residue 1068 or is inserted at the C-terminus of amino acid residue 1069, as numbered in the above Cas9 reference sequence, or a corresponding amino acid residue in another Cas9 polypeptide. In some embodiments, the deaminase (e.g., adenosine deaminase) is inserted to replace amino acid residue 1067, or is inserted to replace amino acid residue 1068, or is inserted to replace amino acid residue 1069, as numbered in the above Cas9 reference sequence, or a corresponding amino acid residue in another Cas9 polypeptide.

[0722] In some embodiments, the deaminase (e.g., adenosine deaminase) is inserted at amino acid residue 1246, or is inserted at amino acid residue 1247, or is inserted at amino acid residue 1248, as numbered in the above Cas9 reference sequence, or a corresponding amino acid residue in another Cas9 polypeptide. In some embodiments, the deaminase (e.g., adenosine deaminase) is inserted at the N-terminus of amino acid residue 1246 or is inserted at the N-terminus of amino acid residue 1247 or is inserted at the N-terminus of amino acid residue 1248, as numbered in the above Cas9 reference sequence, or a corresponding amino acid residue in another Cas9 polypeptide. In some embodiments, the deaminase (e.g., adenosine deaminase) is inserted at the C-terminus of amino acid residue 1246 or is inserted at the C-terminus of amino acid residue 1247 or is inserted at the C-terminus of amino acid residue 1248, as numbered in the above Cas9 reference sequence, or a corresponding amino acid residue in another Cas9 polypeptide. In some embodiments, the deaminase (e.g., adenosine deaminase) is inserted to replace amino acid residue 1246, or is inserted to replace amino acid residue 1247, or is inserted to replace amino acid residue 1248, as numbered in the above Cas9 reference sequence, or a corresponding amino acid residue in another Cas9 polypeptide.

[0723] In some embodiments, a heterologous polypeptide (e.g., deaminase) is inserted in a flexible loop of a Cas9 polypeptide. The flexible loop portions can be selected from the group consisting of 530-537, 569-570, 686-691, 943-947, 1002-1025, 1052-1077, 1232-1247, or 1298-1300 as numbered in the above Cas9 reference sequence, or a corresponding amino acid residue in another Cas9 polypeptide. The flexible loop portions can be selected from the group consisting of: 1-529, 538-568, 580-685, 692-942, 948-1001, 1026-1051, 1078-1231, or 1248-1297 as numbered in the above Cas9 reference sequence, or a corresponding amino acid residue in another Cas9 polypeptide.

[0724] A heterologous polypeptide (e.g., adenine deaminase) can be inserted into a Cas9 polypeptide region corresponding to amino acid residues: 1017-1069, 1242-1247, 1052-1056, 1060-1077, 1002-1003, 943-947, 530-537, 568-579, 686-691, 1242-1247, 1298-1300, 1066-1077, 1052-1056, or 1060-1077 as numbered in the above Cas9 reference sequence, or a corresponding amino acid residue in another Cas9 polypeptide.

[0725] A heterologous polypeptide (e.g., adenine deaminase) can be inserted in place of a deleted region of a Cas9 polypeptide. The deleted region can correspond to an N-terminal or C-terminal portion of the Cas9 polypeptide. In some embodiments, the deleted region corresponds to residues 792-872 as numbered in the above Cas9 reference sequence, or a corresponding amino acid residue in another Cas9 polypeptide. In some embodiments, the deleted region corresponds to residues 792-906 as numbered in the above Cas9 reference sequence, or a corresponding amino acid residue in another Cas9 polypeptide. In some embodiments, the deleted region corresponds to residues 2-791 as numbered in the above Cas9 reference sequence, or a corresponding amino acid residue in another Cas9 polypeptide. In some embodiments, the deleted region corresponds to residues 1017-1069 as numbered in the above Cas9 reference sequence, or corresponding amino acid residues thereof.

[0726] Exemplary internal fusion base editors are provided in Table 14A below and are also described in PCT/US20/16285.

TABLE 14A
Insertion loci in Cas9 proteins

| BE ID | Modification | Other ID |
|---|---|---|
| IBE001 | Cas9 TadA ins 1015 | ISLAY01 |
| IBE002 | Cas9 TadA ins 1022 | ISLAY02 |
| IBE003 | Cas9 TadA ins 1029 | ISLAY03 |
| IBE004 | Cas9 TadA ins 1040 | ISLAY04 |
| IBE005 | Cas9 TadA ins 1068 | ISLAY05 |
| IBE006 | Cas9 TadA ins 1247 | ISLAY06 |
| IBE007 | Cas9 TadA ins 1054 | ISLAY07 |
| IBE008 | Cas9 TadA ins 1026 | ISLAY08 |
| IBE009 | Cas9 TadA ins 768 | ISLAY09 |
| IBE020 | delta HNH TadA 792 | ISLAY20 |
| IBE021 | N-term fusion single TadA helix truncated 165-end | ISLAY21 |
| IBE029 | TadA-Circular Permutant 116 ins 1067 | ISLAY29 |
| IBE031 | TadA-Circular Permutant 136 ins 1248 | ISLAY31 |
| IBE032 | TadA-Circular Permutant 136 ins 1052 | ISLAY32 |
| IBE035 | delta 792-872 TadA ins | ISLAY35 |
| IBE036 | delta 792-906 TadA ins | ISLAY36 |
| IBE043 | TadA-Circular Permutant 65 ins 1246 | ISLAY43 |
| IBE044 | TadA ins C-term truncate 2791 | ISLAY44 |

[0727] A heterologous polypeptide (e.g., deaminase) can be inserted within a structural or functional domain of a Cas9 polypeptide. A heterologous polypeptide (e.g., deaminase) can be inserted between two structural or functional domains of a Cas9 polypeptide. A heterologous polypeptide (e.g., deaminase) can be inserted in place of a structural or functional domain of a Cas9 polypeptide, for example, after deleting the domain from the Cas9 polypeptide. The structural or functional domains of a Cas9 polypeptide can include, for example, RuvC I, RuvC II, RuvC III, Rec1, Rec2, PI, or HNH.

[0728] In some embodiments, the Cas9 polypeptide lacks one or more domains selected from the group consisting of: RuvC I, RuvC II, RuvC III, Rec1, Rec2, PI, or HNH domain. In some embodiments, the Cas9 polypeptide lacks a nuclease domain. In some embodiments, the Cas9 polypeptide lacks an HNH domain. In some embodiments, the Cas9 polypeptide lacks a portion of the HNH domain such that the Cas9 polypeptide has reduced or abolished HNH activity.

[0729] In some embodiments, the Cas9 polypeptide comprises a deletion of the nuclease domain, and the deaminase is inserted to replace the nuclease domain. In some embodiments, the HNH domain is deleted and the deaminase is inserted in its place. In some embodiments, one or more of the RuvC domains is deleted and the deaminase is inserted in its place.

[0730] A fusion protein comprising a heterologous polypeptide can be flanked by a N-terminal and a C-terminal fragment of a napDNAbp. In some embodiments, the fusion protein comprises a deaminase flanked by a N-terminal fragment and a C-terminal fragment of a Cas9 polypeptide. The N terminal fragment or the C terminal fragment can bind the target polynucleotide sequence. The C-terminus of the N terminal fragment or the N-terminus of the C terminal fragment can comprise a part of a flexible loop of a Cas9 polypeptide. The C-terminus of the N terminal fragment or the N-terminus of the C terminal fragment can comprise a part of an alpha-helix structure of the Cas9 polypeptide. The N-terminal fragment or the C-terminal fragment can comprise a DNA binding domain. The N-terminal fragment or the C-terminal fragment can comprise a RuvC domain. The N-terminal fragment or the C-terminal fragment can comprise an HNH domain. In some embodiments, neither of the N-terminal fragment and the C-terminal fragment comprises an HNH domain.

[0731] In some embodiments, the C-terminus of the N terminal Cas9 fragment comprises an amino acid that is in proximity to a target nucleobase when the fusion protein deaminates the target nucleobase. In some embodiments, the N-terminus of the C terminal Cas9 fragment comprises an amino acid that is in proximity to a target nucleobase when the fusion protein deaminates the target nucleobase. The insertion location of different deaminases can be different in order to have proximity between the target nucleobase and an amino acid in the C-terminus of the N terminal Cas9 fragment or the N-terminus of the C terminal Cas9 fragment. For example, the insertion position of an ABE can be at an amino acid residue selected from the group consisting of: 1015, 1022, 1029, 1040, 1068, 1247, 1054, 1026, 768, 1067, 1248, 1052, and 1246 as numbered in the above Cas9 reference sequence, or a corresponding amino acid residue in another Cas9 polypeptide.

[0732] The N-terminal Cas9 fragment of a fusion protein (i.e. the N-terminal Cas9 fragment flanking the deaminase in a fusion protein) can comprise the N-terminus of a Cas9 polypeptide. The N-terminal Cas9 fragment of a fusion protein can comprise a length of at least about: 100, 200, 300, 400, 500, 600, 700, 800, 900, 1000, 1100, 1200, or 1300 amino acids. The N-terminal Cas9 fragment of a fusion protein can comprise a sequence corresponding to amino acid residues: 1-56, 1-95, 1-200, 1-300, 1-400, 1-500, 1-600, 1-700, 1-718, 1-765, 1-780, 1-906, 1-918, or 1-1100 as numbered in the above Cas9 reference sequence, or a corresponding amino acid residue in another Cas9 polypeptide. The N-terminal Cas9 fragment can comprise a sequence comprising at least: 85%, at least 90%, at least 91%, at least 92%, at least 93%, at least 94%, at least 95%, at least 96%, at least 97%, at least 98%, at least 99%, or at least 99.5% sequence identity to amino acid residues: 1-56, 1-95, 1-200, 1-300, 1-400, 1-500, 1-600, 1-700, 1-718, 1-765, 1-780, 1-906, 1-918, or 1-1100 as numbered in the above Cas9 reference sequence, or a corresponding amino acid residue in another Cas9 polypeptide.

[0733] The C-terminal Cas9 fragment of a fusion protein (i.e. the C-terminal Cas9 fragment flanking the deaminase in a fusion protein) can comprise the C-terminus of a Cas9 polypeptide. The C-terminal Cas9 fragment of a fusion protein can comprise a length of at least about: 100, 200, 300, 400, 500, 600, 700, 800, 900, 1000, 1100, 1200, or 1300 amino acids. The C-terminal Cas9 fragment of a fusion protein can comprise a sequence corresponding to amino acid residues: 1099-1368, 918-1368, 906-1368, 780-1368, 765-1368, 718-1368, 94-1368, or 56-1368 as numbered in the above Cas9 reference sequence, or a corresponding amino acid residue in another Cas9 polypeptide. The N-terminal Cas9 fragment can comprise a sequence comprising at least: 85%, at least 90%, at least 91%, at least 92%, at least 93%, at least 94%, at least 95%, at least 96%, at least 97%, at least 98%, at least 99%, or at least 99.5% sequence identity to amino acid residues: 1099-1368, 918-1368, 906-1368, 780-1368, 765-1368, 718-1368, 94-1368, or 56-1368 as numbered in the above Cas9 reference sequence, or a corresponding amino acid residue in another Cas9 polypeptide.

[0734] The N-terminal Cas9 fragment and C-terminal Cas9 fragment of a fusion protein taken together may not correspond to a full-length naturally occurring Cas9 polypeptide sequence, for example, as set forth in the above Cas9 reference sequence.

[0735] The fusion protein described herein can effect targeted deamination with reduced deamination at non-target sites (e.g., off-target sites), such as reduced genome wide spurious deamination. The fusion protein described herein can effect targeted deamination with reduced bystander deamination at non-target sites. The undesired deamination or off-target deamination can be reduced by at least 30%, at least 40%, at least 50%, at least 60%, at least 70%, at least 80%, at least 90%, at least 95%, or at least 99% compared with, for example, an end terminus fusion protein comprising the deaminase fused to a N terminus or a C terminus of a Cas9 polypeptide. The undesired deamination or off-target deamination can be reduced by at least one-fold, at least two-fold, at least three-fold, at least four-fold, at least five-fold, at least tenfold, at least fifteen fold, at least twenty fold, at least thirty fold, at least forty fold, at least fifty fold, at least 60 fold, at least 70 fold, at least 80 fold, at least 90 fold, or at least hundred fold, compared with, for example, an end terminus fusion protein comprising the deaminase fused to a N terminus or a C terminus of a Cas9 polypeptide.

[0736] In some embodiments, the deaminase (e.g., adenosine deaminase) of the fusion protein deaminates no more than two nucleobases within the range of an R-loop. In some embodiments, the deaminase of the fusion protein deaminates no more than three nucleobases within the range of the R-loop. In some embodiments, the deaminase of the fusion protein deaminates no more than 2, 3, 4, 5, 6, 7, 8, 9, or 10 nucleobases within the range of the R-loop. An R-loop is a three-stranded nucleic acid structure including a DNA:RNA hybrid, a DNA:DNA or an RNA: RNA complementary structure and the associated with single-stranded DNA. As used herein, an R-loop may be formed when a target polynucleotide is contacted with a CRISPR complex or a base editing complex, wherein a portion of a guide polynucleotide, e.g. a guide RNA, hybridizes with and displaces with a portion of a target polynucleotide, e.g. a target DNA. In some embodiments, an R-loop comprises a hybridized region of a spacer sequence and a target DNA complementary sequence. An R-loop region may be of about 5, 6, 7, 8, 9, 10, 11, 12, 13, 14, 15, 16, 17, 18, 19, 20, 21, 22, 23, 24, 25, 26, 27, 28, 29, 30, 31, 32, 33, 34, 35, 36, 37, 38, 39, 40, 41, 42, 43, 44, 45, 46, 47, 48, 49, or 50 nucleobase pairs in length. In some embodiments, the R-loop region is about 20 nucleobase pairs in length. It should be understood that, as used herein, an R-loop region is not limited to the target DNA strand that hybridizes with the guide polynucleotide. For example, editing of a target nucleobase within an R-loop region may be to a DNA strand that comprises the complementary strand to a guide RNA, or may be to a DNA strand that is the opposing strand of the strand complementary to the guide RNA. In some embodiments, editing in the region of the R-loop comprises editing a nucleobase on non-complementary strand (protospacer strand) to a guide RNA in a target DNA sequence.

[0737] The fusion protein described herein can effect target deamination in an editing window different from canonical base editing. In some embodiments, a target nucleobase is from about 1 to about 20 bases upstream of a PAM sequence in the target polynucleotide sequence. In some embodiments, a target nucleobase is from about 2 to about 12 bases upstream of a PAM sequence in the target polynucleotide sequence. In some embodiments, a target nucleobase is from about 1 to 9 base pairs, about 2 to 10 base pairs, about 3 to 11 base pairs, about 4 to 12 base pairs, about 5 to 13 base pairs, about 6 to 14 base pairs, about 7 to 15 base pairs, about 8 to 16 base pairs, about 9 to 17 base pairs, about 10 to 18 base pairs, about 11 to 19 base pairs, about 12 to 20 base pairs, about 1 to 7 base pairs, about 2 to 8 base pairs, about 3 to 9 base pairs, about 4 to 10 base pairs, about 5 to 11 base pairs, about 6 to 12 base pairs, about 7 to 13 base pairs, about 8 to 14 base pairs, about 9 to 15 base pairs, about 10 to 16 base pairs, about 11 to 17 base pairs, about 12 to 18 base pairs, about 13 to 19 base pairs, about 14 to 20 base pairs, about 1 to 5 base pairs, about 2 to 6 base pairs, about 3 to 7 base pairs, about 4 to 8 base pairs, about 5 to 9 base pairs, about 6 to 10 base pairs, about 7 to 11 base pairs, about 8 to 12 base pairs, about 9 to 13 base pairs, about 10 to 14 base pairs, about 11 to 15 base pairs, about 12 to 16 base pairs, about 13 to 17 base pairs, about 14 to 18 base pairs, about 15 to 19 base pairs, about 16 to 20 base pairs, about 1 to 3 base pairs, about 2 to 4 base pairs, about 3 to 5 base pairs, about 4 to 6 base pairs, about 5 to 7 base pairs, about 6 to 8 base pairs, about 7 to 9 base pairs, about 8 to 10 base pairs, about 9 to 11 base pairs, about 10 to 12 base pairs, about 11 to 13 base pairs, about 12 to 14 base pairs, about 13 to 15 base pairs, about 14 to 16 base pairs, about 15 to 17 base pairs, about 16 to 18 base pairs, about 17 to 19 base pairs, about 18 to 20 base pairs away or upstream of the PAM sequence. In some embodiments, a target nucleobase is about 1, 2, 3, 4, 5, 6, 7, 8, 9, 10, 11, 12, 13, 14, 15, 16, 17, 18, 19, 20, or more base pairs away from or upstream of the PAM sequence. In some embodiments, a target nucleobase is about 1, 2, 3, 4, 5, 6, 7, 8, or 9 base pairs upstream of the PAM sequence. In some embodiments, a target nucleobase is about 2, 3, 4, or 6 base pairs upstream of the PAM sequence.

[0738] The fusion protein can comprise more than one heterologous polypeptide. For example, the fusion protein can additionally comprise one or more UGI domains and/or one or more nuclear localization signals. The two or more heterologous domains can be inserted in tandem. The two or more heterologous domains can be inserted at locations such that they are not in tandem in the NapDNAbp.

[0739] A fusion protein can comprise a linker between the deaminase and the napDNAbp polypeptide. The linker can be a peptide or a non-peptide linker. For example, the linker can be an XTEN, (GGGS)n (SEQ ID NO: 130), (GGGGS)n (SEQ ID NO: 131), (G)n, (EAAAK)n (SEQ ID NO: 132), (GGS)n, SGSETPGTSESATPES (SEQ ID NO: 55). In some embodiments, the fusion protein comprises a linker between the N-terminal Cas9 fragment and the deaminase. In some embodiments, the fusion protein comprises a linker between the C-terminal Cas9 fragment and the deaminase. In some embodiments, the N-terminal and C-terminal fragments of napDNAbp are connected to the deaminase with a linker. In some embodiments, the N-terminal and C-terminal fragments are joined to the deaminase domain without a linker. In some embodiments, the fusion protein comprises a linker between the N-terminal Cas9 fragment and the deaminase but does not comprise a linker between the C-terminal Cas9 fragment and the deaminase. In some embodiments, the fusion protein comprises a linker between the C-terminal Cas9 fragment and the deaminase but does not comprise a linker between the N-terminal Cas9 fragment and the deaminase.

[0740] In other embodiments, the N- or C-terminal fragments of the Cas12 polypeptide comprise a nucleic acid programmable DNA binding domain or a RuvC domain. In other embodiments, the fusion protein contains a linker between the Cas12 polypeptide and the catalytic domain. In other embodiments, the amino acid sequence of the linker is GGSGGS (SEQ ID NO: 168) or GSSGSETPGTSESATPESSG (SEQ ID NO: 169). In other embodiments, the linker is a rigid linker. In other embodiments of the above aspects, the linker is encoded by GGAGGCTCTGGAGGAAGC (SEQ ID NO: 170) or GGCTCTTCTGGATCTGAAACACCTGGCACAAGCGAGAGCGCCACCCCTGAGAGCTC TGGC (SEQ ID NO: 171).

[0741] Fusion proteins comprising a heterologous catalytic domain flanked by N- and C-terminal fragments of a Cas9 or Cas12 polypeptide are also useful for base editing in the methods as described herein. Fusion proteins comprising Cas9 or Cas12 and one or more deaminase domains, e.g., adenosine deaminase, or comprising an adenosine deaminase domain flanked by Cas9 or Cas12 sequences are also useful for highly specific and efficient base editing of target sequences. In an embodiment, a chimeric Cas9 or Cas12 fusion protein contains a heterologous catalytic domain inserted within a Cas12 polypeptide.

[0742] In various embodiments, the catalytic domain has DNA modifying activity (e.g., deaminase activity), such as adenosine deaminase activity. In some embodiments, the adenosine deaminase is a TadA (e.g., TadA7.10). In some embodiments, the TadA is a TadA*8. In other embodiments, the fusion protein contains one or more catalytic domains. In other embodiments, at least one of the one or more catalytic domains is inserted within the Cas12 polypeptide or is fused at the Cas12 N-terminus or C-terminus. In other embodiments, at least one of the one or more catalytic domains is inserted within a loop, an alpha helix region, an unstructured portion, or a solvent accessible portion of the Cas12 polypeptide. In other embodiments, the Cas12 polypeptide is Cas12a, Cas12b, Cas12c, Cas12d, Cas12e, Cas12g, Cas12h, or Cas12i. In other embodiments, the Cas12 polypeptide has at least about 85% amino acid sequence identity to Bacillus hisashii Cas12b, Bacillus thermoamylovorans Cas12b, Bacillus sp. V3-13 Cas12b, or Alicyclobacillus acidiphilus Cas12b. In other embodiments, the Cas12 polypeptide has at least about 90% amino acid sequence identity to Bacillus hisashii Cas12b, Bacillus thermoamylovorans Cas12b, Bacillus sp. V3-13 Cas12b, or Alicyclobacillus acidiphilus Cas12b. In other embodiments, the Cas12 polypeptide has at least about 95% amino acid sequence identity to Bacillus hisashii Cas12b, Bacillus thermoamylovorans Cas12b, Bacillus sp. V3-13 Cas12b, or Alicyclobacillus acidiphilus Cas12b. In other embodiments, the Cas12 polypeptide contains or consists essentially of a fragment of Bacillus hisashii Cas12b, Bacillus thermoamylovorans Cas12b, Bacillus sp. V3-13 Cas12b, or Alicyclobacillus acidiphilus Cas12b.

[0743] In other embodiments, the catalytic domain is inserted between amino acid positions 153-154, 255-256, 306-307, 980-981, 1019-1020, 534-535, 604-605, or 344-345 of BhCas12b or a corresponding amino acid residue of Cas12a, Cas12c, Cas12d, Cas12e, Cas12g, Cas12h, or Cas12i. In other embodiments, the catalytic domain is inserted between amino acids P153 and S154 of BhCas12b. In other embodiments, the catalytic domain is inserted between amino acids K255 and E256 of BhCas12b. In other embodiments, the catalytic domain is inserted between amino acids D980 and G981 of BhCas12b. In other embodiments, the catalytic domain is inserted between amino acids K1019 and L1020 of BhCas12b. In other embodiments, the catalytic domain is inserted between amino acids F534 and P535 of BhCas12b. In other embodiments, the catalytic domain is inserted between amino acids K604 and G605 of BhCas12b. In other embodiments, the catalytic domain is inserted between amino acids H344 and F345 of BhCas12b. In other embodiments, catalytic domain is inserted between amino acid positions 147 and 148, 248 and 249, 299 and 300, 991 and 992, or 1031 and 1032 of BvCas12b or a corresponding amino acid residue of Cas12a, Cas12c, Cas12d, Cas12e, Cas12g, Cas12h, or Cas12i. In other embodiments, the catalytic domain is inserted between amino acids P147 and D148 of BvCas12b. In other embodiments, the catalytic domain is inserted between amino acids G248 and G249 of BvCas12b. In other embodiments, the catalytic domain is inserted between amino acids P299 and E300 of BvCas12b. In other embodiments, the catalytic domain is inserted between amino acids G991 and E992 of BvCas12b. In other embodiments, the catalytic domain is inserted between amino acids K1031 and M1032 of BvCas12b. In other embodiments, the catalytic domain is inserted between amino acid positions 157 and 158, 258 and 259, 310 and 311, 1008 and 1009, or 1044 and 1045 of AaCas12b or a corresponding amino acid residue of Cas12a, Cas12c, Cas12d, Cas12e, Cas12g, Cas12h, or Cas12i. In other embodiments, the catalytic domain is inserted between amino acids P157 and G158 of AaCas12b. In other embodiments, the catalytic domain is inserted between amino acids V258 and G259 of AaCas12b. In other embodiments, the catalytic domain is inserted between amino acids D310 and P311 of AaCas12b. In other embodiments, the catalytic domain is inserted between amino acids G1008 and E1009 of AaCas12b. In other embodiments, the catalytic domain is inserted between amino acids G1044 and K1045 at of AaCas12b.

[0744] In other embodiments, the fusion protein contains a nuclear localization signal (e.g., a bipartite nuclear localization signal). In other embodiments, the amino acid sequence of the nuclear localization signal is MAPKKKRKVGIHGVPAA (SEQ ID NO: 172). In other embodiments of the above aspects, the nuclear localization signal is encoded by the following sequence:

[0745] ATGGCCCCAAAGAAGAAGCGGAAGGTCGGTATCCACGGAGTCCCAGCAGCC (SEQ ID NO: 173). In other embodiments, the Cas12b polypeptide contains a mutation that silences the catalytic activity of a RuvC domain. In other embodiments, the Cas12b polypeptide contains D574A, D829A and/or D952A mutations. In other embodiments, the fusion protein further contains a tag (e.g., an influenza hemagglutinin tag).

[0746] In some embodiments, the fusion protein comprises a napDNAbp domain (e.g., Cas12-derived domain) with an internally fused nucleobase editing domain (e.g., all or a portion of a deaminase domain, e.g., an adenosine deaminase domain). In some embodiments, the napDNAbp is a Cas12b. In some embodiments, the base editor comprises a Cas12 domain (e.g., a BhCas12b domain, a BvCas12b domain, or an AACas12b domain) with an internally fused TadA*8 domain inserted at the loci provided in the below Table 14B.

TABLE 14B
Insertion loci in Cas12b proteins

| | Insertion site | Inserted between aa |
|---|---|---|
| BhCas12b | | |
| position 1 | 153 | PS |
| position 2 | 255 | KE |
| position 3 | 306 | DE |
| position 4 | 980 | DG |
| position 5 | 1019 | KL |
| position 6 | 534 | FP |
| position 7 | 604 | KG |
| position 8 | 344 | HF |
| BvCas12b | | |
| position 1 | 147 | PD |
| position 2 | 248 | GG |
| position 3 | 299 | PE |
| position 4 | 991 | GE |
| position 5 | 1031 | KM |
| AaCas12b | | |
| position 1 | 157 | PG |
| position 2 | 258 | VG |
| position 3 | 310 | DP |
| position 4 | 1008 | GE |
| position 5 | 1044 | GK |

[0747] By way of nonlimiting example, an adenosine deaminase (e.g., ABE8.13) may be inserted into a BhCas12b to produce a fusion protein (e.g., ABE8.13-BhCas12b) that effectively edits a nucleic acid sequence, such as a nucleic acid sequence comprising a single nucleotide polymorphism (SNP) associated with sickle cell disease (SCD). In an embodiment the nucleic acid sequence encodes an HBB polypeptide.

[0748] Exemplary, yet nonlimiting, fusion proteins are described in U.S. Provisional Application Nos. 62/852,228 and 62/852,224, the contents of which are incorporated by reference herein in their entireties.

[0749] The practice of the present invention employs, unless otherwise indicated, conventional techniques of molecular biology (including recombinant techniques), microbiology, cell biology, biochemistry and immunology, which are well within the purview of the skilled artisan. Such techniques are explained fully in the literature, such as, “Molecular Cloning: A Laboratory Manual”, second edition (Sambrook, 1989); “Oligonucleotide Synthesis” (Gait, 1984); “Animal Cell Culture” (Freshney, 1987); “Methods in Enzymology” “Handbook of Experimental Immunology” (Weir, 1996); “Gene Transfer Vectors for Mammalian Cells” (Miller and Calos, 1987); “Current Protocols in Molecular Biology” (Ausubel, 1987); “PCR: The Polymerase Chain Reaction”, (Mullis, 1994); “Current Protocols in Immunology” (Coligan, 1991). These techniques are applicable to the production of the polynucleotides and polypeptides of the invention, and, as such, may be considered in making and practicing the invention. Particularly useful techniques for particular embodiments will be discussed in the sections that follow.

[0750] The following examples are put forth so as to provide those of ordinary skill in the art with a complete disclosure and description of how to make and use the assay, screening, and therapeutic methods of the invention, and are not intended to limit the scope of what the inventors regard as their invention.

### EXAMPLES

### Example 1: Adenosine Base Editors with Increased Editing Efficiency

[0751] Base editing systems that include a Tad7.10-dCas9 fusion proteins are capable of editing a target polynucleotide with approximately 10-20% efficiency, but for uses requiring higher efficiency their use may be limited. In an effort to identify adenine base editors having increased efficiency and specificity, constructs comprising the adenosine deaminase TadA 7.10 were mutagenized by error prone PCR and subsequently cloned into an expression vector adjacent to a nucleic acid sequence encoding dCas9, a nucleic acid programmable DNA binding protein (FIG. 1A). The expression vectors comprising the adenosine deaminase variants were co-transformed into competent bacterial cells with a selection plasmid encoding chloramphenicol resistance (CamR) and spectinomycin resistance (SpectR) and having a kanamycin resistance gene that was rendered nonfunctional by two point mutations (evolution round 7 strategy) (FIG. 1B). The cells were selected for restoration of kanamycin resistance, which was a read out for adenosine deaminase activity. In subsequent rounds of selection, the expression vectors were co-transformed into competent cells with a plasmid encoding chloramphenicol resistance (CamR) and spectinomycin resistance (SpectR) and having a kanamycin resistance gene that was rendered nonfunctional by three point mutations (evolution round 8 strategy) (FIG. 1C).

An inactivated kanamycin resistance gene nucleic acid sequence is provided below:

(SEQ ID NO: 174)
ccggaattgccagctggggcgccctctggtaaggttgggaagccctgcaa
agtaaactggatggctttcttgccgccaaggatctgatggcgcaggggat
caagatctgatcaagagacaggatgaggatcctttcgcATGATCGAATAA
GATGGATTGCACGCAGGTTCTCCGGCCGCTTAGGTGGAGCGCCTATTCGG
CTATGACTGGGCACAACAGACAATCGGCTGCTCTGATGCCGCCGTGTTCC
GGCTGTCAGCGCAGGGGCGCCCGGTTCTTTTTGTCAAGACCGACCTGTCC
GGTGCCCTGAATGAACTGCAGGACGAGGCAGCGCGGCTATCGTGGCTGGC
CACGACGGGCGTTCCTTGCGCAGCTGTGCTCGACGTTGTCACTGAAGCGG
GAAGGGACTGGCTGCTATTGGGCGAAGTGCCGGGGCAGGATCTCCTGTCA
TCTCACCTTGCTCCTGCCGAGAAAGTATCCATCATGGCTGATGCAATGCG
GCGGCTGCATACGCTTGATCCGGCTACCTGCCCATTCGACCACCAAGCGA
AACATCGCATCGAGCGAGCACGTACTCGGATGGAAGCCGGTCTTGTCGAT
CAGGATGATCTGGACGAAGAGCATCAGGGGCTCGCGCCAGCCGAACTGTT
CGCCAGGCTCAAGGCGCGCATGCCCGACGGCGAGGATCTCGTCGTGACCC
ATGGCGATGCCTGCTTGCCGAATATCATGGTGGAAAATGGCCGCTTTTCT
GGATTCATTAACTGTGGCCGGCTGGGTGTGGCGGACCGCTATCAGGACAT
AGCGTTGGCTACCCGTGATATTGCTGAAGAGCTTGGCGGCGAATGGGCTG
ACCGCTTCCTCGTGCTTTACGGTATCGCCGCTCCCGATTCGCAGCGCATC
GCCTTCTATCGCCTTCTTGACGAGTTCTTCTAA

[0752] In the above sequence, lower case denotes the kanamycin resistance promoter region, bold sequence indicates targeted inactivation portion (Q4* and W15*), the italicized sequence denotes the targeted inactive site of kanamycin resistance gene (D208N), and the underlined sequences denote the PAM sequences.

[0753] Again, the cells were plated onto a series of agarose plates with increasing kanamycin concentration. As shown in FIG. 2, adenosine deaminase variants having efficient base editing activity were able to correct the mutations present in the kanamycin resistance gene and were selected for further analysis. Adenosine deaminase variant base editors showing efficient base editing in bacterial cells are described in Table 14. Mammalian expression vectors encoding base editors comprising the selected adenosine deaminase variants were generated.

[0754] Hek293T cells expressing a ß-globin protein associated with sickle cell disease that contains an E6V (also termed E7V) mutation were used to test the editing efficiency of the adenosine deaminase variants (FIGS. 3A and 3B). These cells termed “Hek293T/HBBE6V” cells were transduced using lentiviral vectors expressing a base editing system that includes a fusion protein comprising the ABE8s listed in Table 15. The ABE8s were generated by cloning an adenosine deaminase variant into a scaffold that included a circular permutant Cas9 and a bipartite nuclear localization sequence. Circular permutant Cas9s are known in the art and described, for example, in Oakes et al., Cell 176, 254-267, 2019. These sequences are provided herein below.

[0755] Upregulation of fetal hemoglobin is a therapeutic approach to overcoming sickle cell disease. FIG. 3A shows a therapeutically relevant site for upregulation of fetal hemoglobin. Editing adenosines at residues 5 and 8 can significantly reduce BCL11A binding, thereby increasing expression of fetal hemoglobin. Referring to FIG. 3A, the ABE8s exhibited approximately 2-3 fold more base editing activity than the base editor ABE7.10.

TABLE 15
Novel Adenine Base Editors ABE8

| plasmid ID | description | function |
|---|---|---|
| 280 | ABE8.1 | monomer_TadA*7.10 + Y147T |
| 281 | ABE8.2 | monomer_TadA*7.10 + Y147R |
| 282 | ABE8.3 | monomer_TadA*7.10 + Q154S |
| 283 | ABE8.4 | monomer_TadA*7.10 + Y123H |
| 284 | ABE8.5 | monomer_TadA*7.10 + V82S |
| 285 | ABE8.6 | monomer_TadA*7.10 + T166R |
| 286 | ABE8.7 | monomer_TadA*7.10 + Q154R |
| 287 | ABE8.8 | monomer, Y147R_Q154R_Y123H |
| 288 | ABE8.9 | monomer, Y147R_Q154R_I76Y |
| 289 | ABE8.10 | monomer, Y147R_Q154R_T166R |
| 290 | ABE8.11 | monomer, Y147T_Q154R |
| 291 | ABE8.12 | monomer, Y147T_Q154S |
| 292 | ABE8.13 | monomer_H123Y123H_Y147R_Q154R_I76Y |
| 293 | ABE8.14 | heterodimer_TadA*7.10 + Y147T |
| 294 | ABE8.15 | heterodimer_TadA*7.10 + Y147R |
| 295 | ABE8.16 | heterodimer_TadA*7.10 + Q154S |
| 296 | ABE8.17 | heterodimer_TadA*7.10 + Y123H |
| 297 | ABE8.18 | heterodimer_TadA*7.10 + V82S |
| 298 | ABE8.19 | heterodimer_TadA*7.10 + T166R |
| 299 | ABE8.20 | heterodimer_TadA*7.10 + Q154R |
| 300 | ABE8.21 | heterodimer_Y147R_Q154R_Y123H |
| 301 | ABE8.22 | heterodimer_Y147R_Q154R_I76Y |
| 302 | ABE8.23 | heterodimer_Y147R_Q154R_T166R |
| 303 | ABE8.24 | heterodimer_Y147T_Q154R |
| 304 | ABE8.25 | heterodimer_Y147T_Q154S |

[0756] Referring to FIG. 4, the ABE8s were introduced into Hek293T/HBBE6V cells along with 18, 19, 20, 21, or 22 nucleotide guide RNAs targeting the polynucleotide encoding HBB E6V. The ABE8 editors showed increased editing efficiency when fused to circular permutant (Cp)-Cas9. In total, 40 different ABE8 constructs (Table 16) and three ABE7.10 constructs were tested for editing activity in Hek293T/HBBE6V cells. The sequence of exemplary constructs follows. To evaluate the specificity of editing, target and unintended or bystander mutations were monitored (FIG. 5). Unintended editing of an adenosine in codon 5 was silent. However, unintended editing of codon 9 resulted in a serine to proline mutation. Referring again to FIG. 5, multiple ABE8s showed increased editing efficiency and specificity compared to the ABE7.10 editors, and none of the editors had significant bystander editing that led to the serine to proline missense mutation.

[0757] Further analysis of selected ABE8s and an ABE7.10 control was carried out in fibroblast cells containing the sickle cell mutation. As shown in FIG. 6, the ABE8 editors had increased base editing activity compared to the ABE7.10. ABE8.18 showed approximately 70% efficiency. The selected ABE8 editors also displayed unprecedented specificity. Importantly, the average INDEL formation for all ABE8 editors was less than 0.1%.

TABLE 16

| plasmid ID | description | function |
|---|---|---|
| 335 | NGC PAM CP5 variant (S. pyogenes Cas9)_ABE8.1 | monomer_TadA*7.10 + Y147T |
| 336 | NGC PAM CP5 variant (S. pyogrouns Cas9)_ABE8.2 | monomer_TadA*7.10 + Y147R |
| 337 | NGC PAM CP5 variant (S. pyogenes Cas9)_ABE8.3 | monomer_TadA*7.10 + Q154S |
| 338 | NGC PAM CP5 variant (S. pyogenes Cas9)_ABE8.4 | monomer_TadA*7.10 + Y123H |
| 339 | NGC PAM CP5 variant (S. pyogenes Cas9)_ABE8.5 | monomer_TadA*7.10 + V82S |
| 340 | NGC PAM CP5 variant (S. pyogenes Cas9)_ABE8.6 | monomer_TadA*7.10 + T166R |
| 341 | NGC PAM CP5 variant (S. pyogenes Cas9)_ABE8.7 | monomer_TadA*7.10 + Q154R |
| 342 | NGC PAM CP5 variant (S. pyogenes Cas9)_ABE8.8 | monomer, Y147R_Q154R_Y123H |
| 343 | NGC PAM CP5 variant (S. pyogenes Cas9)_ABE8.9 | monomer, Y147R_Q154R_I76Y |
| 344 | NGC PAM CP5 variant (S. pyogenes Cas9)_ABE8.10 | monomer, Y147R_Q154R_T166R |
| 345 | NGC PAM CP5 variant (S. pyogenes Cas9)_ABE8.11 | monomer, Y147T_Q154R |
| 346 | NGC PAM CP5 variant (S. pyogenes Cas9)_ABE8.12 | monomer, Y147T_Q154S |
| 347 | NGC PAM CP5 variant (S. pyogenes Cas9)_ABE8.13 | monomer_H123Y123H_Y147R_Q154R_I76Y |
| 348 | NGC PAM CP5 variant (S. pyogenes Cas9)_ABE7.10 | monomer_deletion at TadA7.10* residue 149 |
| 349 | NGC PAM CP5 variant (S. pyogenes Cas9)_ABE7.10 | monomer_deletion at TadA7.10* residue 150 |
| 350 | NGC PAM CP5 variant (S. pyogenes Cas9)_ABE7.10 | monomer_deletion at TadA7.10* residue 151 |
| 351 | NGC PAM CP5 variant (S. pyogenes Cas9)_ABE7.10 | monomer_deletion at TadA7.10* residue 152 |
| 352 | NGC PAM CP5 variant (S. pyogenes Cas9)_ABE7.10 | monomer_deletion at TadA7.10* residue 153 |
| 353 | NGC PAM CP5 variant (S. pyogenes Cas9)_ABE7.10 | monomer_deletion at TadA7.10* residue 154 |
| 354 | NGC PAM CP5 variant (S. pyogenes Cas9)_ABE7.10 | monomer_deletion at TadA7.10* residue 155 |
| 355 | NGC PAM CP5 variant (S. pyogenes Cas9)_ABE7.10 | monomer_deletion at TadA7.10* residue 156 |
| 356 | NGC PAM CP5 variant (S. pyogenes Cas9)_ABE7.10 | monomer_deletion at TadA7.10* residue 157 |
| 357 | NGC PAM CP5 variant (S. pyogenes Cas9)_ABE8.14 | heterodimer_TadA*7.10 + Y147T |
| 358 | NGC PAM CP5 variant (S. pyogenes Cas9)_ABE8.15 | heterodimer_TadA*7.10 + Y147R |
| 359 | NGC PAM CP5 variant (S. pyogenes Cas9)_ABE8.16 | heterodimer_TadA*7.10 + Q154S |
| 360 | NGC PAM CP5 variant (S. pyogenes Cas9)_ABE8.17 | heterodimer_TadA*7.10 + Y123H |
| 361 | NGC PAM CP5 variant (S. pyogenes Cas9)_ABE8.18 | heterodimer_TadA*7.10 + V82S |
| 362 | NGC PAM CP5 variant (S. pyogenes Cas9)_ABE8.19 | heterodimer_TadA*7.10 + T166R |
| 363 | NGC PAM CP5 variant (S. pyogenes Cas9)_ABE8.20 | heterodimer_TadA*7.10 + Q154R |
| 364 | NGC PAM CP5 variant (S. pyogenes Cas9)_ABE8.21 | heterodimer_Y147R_Q154R_Y123H |
| 365 | NGC PAM CP5 variant (S. pyogenes Cas9)_ABE8.22 | heterodimer_Y147R_Q154R_I76Y |
| 366 | NGC PAM CP5 variant (S. pyogenes Cas9)_ABE8.23 | heterodimer_Y147R_Q154R_T166R |
| 367 | NGC PAM CP5 variant (S. pyogenes Cas9)_ABE8.24 | heterodimer_Y147T_Q154R |
| 368 | NGC PAM CP5 variant (S. pyogenes Cas9)_ABE8.25 | heterodimer_Y147T_Q154S |
| 369 | NGC PAM CP5 variant (S. pyogenes Cas9)_ABE8.26 | heterodimer_H123Y123H_Y147R_Q154R_I76Y |
| 370 | NGC PAM CP5 variant (S. pyogenes Cas9)_ABE7.10 | heterodimer_deletion at TadA7.10* residue 149 |
| 371 | NGC PAM CP5 variant (S. pyogenes Cas9)_ABE7.10 | heterodimer_deletion at TadA7.10* residue 150 |
| 372 | NGC PAM CP5 variant (S. pyogenes Cas9)_ABE7.10 | heterodimer_deletion at TadA7.10* residue 151 |
| 373 | NGC PAM CP5 variant (S. pyogenes Cas9)_ABE7.10 | heterodimer_deletion at TadA7.10* residue 152 |
| 374 | NGC PAM CP5 variant (S. pyogenes Cas9)_ABE7.10 | heterodimer_deletion at TadA7.10* residue 153 |
| 375 | NGC PAM CP5 variant (S. pyogenes Cas9)_ABE7.10 | heterodimer_deletion at TadA7.10* residue 154 |
| 376 | NGC PAM CP5 variant (S. pyogenes Cas9)_ABE7.10 | heterodimer_deletion at TadA7.10* residue 155 |
| 377 | NGC PAM CP5 variant (S. pyogenes Cas9)_ABE7.10 | heterodimer_deletion at TadA7.10* residue 156 |
| 378 | NGC PAM CP5 variant (S. pyogenes Cas9)_ABE7.10 | heterodimer_deletion at TadA7.10* residue 157 |

### Example 2: Adenine Base Editors for the Treatment of Hematological Disorders

[0758] Sickle cell disease (SCD) affects approximately 100,000 patients in the United States. Individuals carrying both the SCD mutation and mutations that cause persistence of fetal hemoglobin (HPFH) do not typically present with sickle cell pathologies due to persistent fetal hemoglobin (HbF) levels. Higher HbF levels correlate with greater benefit for individuals with blood disease, such as reduction in disease symptoms and improved overall health. A T to C mutation at the −198 position in the HGB promoter causes HPFH by interference of binding to γ-globulin repressor proteins, such as BCL11A.

[0759] ABE8 constructs were evaluated in human hematopoietic stem cells (HSC). Ex vivo manipulation and/or editing of HSCs prior to administration to patients as a cell therapy is a promising approach for the treatment of hematological disorders. It has been previously demonstrated that ABEs can introduce a T to C substitution at the −198 position of the promoter region of HBG1/2 (Gaudelli, N. M. et al. Programmable base editing of A*T to G*C in genomic DNA without DNA cleavage. Nature 551, 464-471, doi:10.1038/nature24644 (2017)). This naturally occurring allele yields Hereditary Persistence of Fetal Hemoglobin (HPFH) resulting in increased levels of γ-globin into adulthood, which can mitigate the defects in β-globin seen in sickle cell disease and β-thalassemia (Wienert, B. et al. KLF1 drives the expression of fetal hemoglobin in British HPFH. Blood 130, 803-807, doi:10.1182/blood-2017-02-767400 (2017)). With the goal of reproducing the HPFH phenotype and evaluating the clinical relevance of ABE8, CD34+ hematopoietic stem cells were isolated from two donors and transfected with mRNA encoding ABE8 editors and end-modified sgRNA placing the target A at position 7 within the protospacer.

[0760] The average ABE8 editing efficiencies at the −198 HBG1/2 promoter target site were 2-3 times higher than either ABE7.10 construct at early time points (48h), and 1.3-2-fold higher than ABE7.10 at the later time (144h) (FIG. 7B; FIGS. 8A and 8B, FIG. 9). FIG. 7A schematically shows the HBG1/2 promoter target site. FIG. 7C shows that ABE8 editing in CD34+ cells yielded an approximately 1.4-fold increase in γ-globin formation in differentiated erythrocytes (ABE8.13-d resulted in 55% γ-globin/α-globin expression). These kinetic distinctions are clinically important for ex vivo therapies in which cell culturing must be kept to a minimum prior to administration of cell therapy.

[0761] Next, the amount of γ-globin protein produced following ABE treatment and erythrocyte differentiation was quantified by UPLC (FIGS. 10-30). A 3.5-fold average increase in % γ-globin/α-globin expression was observed in erythrocytes derived from the ABE8 treatment groups when compared to mock treated cells and about a 1.4-fold increase was observed when ABE8.13-d was compared to levels achieved with ABE7.10-m/d (FIG. 7B).

[0762] The editing efficiencies and on-target editing (e.g., at nucleotide position 9G in the sickle cell (HbS) allele) by ABE8 editors is further demonstrated in FIGS. 37, 40, 43A, 43B, 44A and 44B.

[0763] It is predicted that 20% HbF is required to ameliorate symptoms of sickle cell disease, and β-thalassemia patients are likely to require even higher minimum levels (see e.g., Canver, M. C. & Orkin, S. H. Customizing the genome as therapy for the beta-hemoglobinopathies. Blood 127, 2536-2545, doi:10.1182/blood-2016-01-678128 (2016); Fitzhugh, C. D. et al., Blood, 130, 1946-1948, doi:10.1182/blood-2017-03-772392 (2017)). The γ-globin levels observed following ABE8 treatment surpassed this threshold for HbF level.

[0764] Overall, ABE8s recreated a naturally-occurring hereditary persistence of fetal hemoglobin (HPFH) allele at the promoter of the γ-globin genes HBG1 and HBG2, achieving editing efficiencies of up to 60% in human CD34+ cell cultures and a corresponding upregulation of gamma globin expression in differentiated erythrocytes. (FIGS. 34A. 34B. 35A-35C)

### Example 3: Complementary Base Editing Approaches for the Treatment of Sickle Cell Disease and Beta Thalassemia (β-Thalassemia)

[0765] Sickle cell disease (SCD) and Beta thalassemia are disorders of beta globin production and function that lead to severe anemia and significant disease complications across a multitude of organ systems. Autologous transplantation of hematopoietic stem cells engineered through the upregulation of fetal hemoglobin (HbF) or correction of the beta globin gene have the potential to reduce disease burden in patients with beta hemoglobinopathies. Base editing is a recently developed technology that enables precise modification of the genome without the introduction of double strand DNA breaks.

[0766] Gamma globin gene promoters were comprehensively screened with cytosine and adenine base editors (ABE) for the identification of alterations that would derepress HbF. Three regions were identified that significantly upregulated HbF, and the most effective nucleotide residue conversions are supported by natural variation seen in patients with hereditary persistence of fetal hemoglobin (HPFH). ABEs have been developed that significantly increase the level of HbF following nucleotide conversion at key regulatory motifs within the HBG1 and HBG2 (HBG1/2) promoters. CD34+ hematopoietic stem and progenitor cells (HSPC) were purified at clinical scale and edited using a process designed to preserve self-renewal capacity. Editing at two independent sites with different ABEs reached 94 percent and resulted in up to 63 percent gamma globin by UPLC (FIGS. 31A-31E). The levels of HbF observed should afford protection to the majority of SCD and ß-thalassemia patients based on clinical observations of HPFH and non-interventional therapy that links higher HbF dosage with milder disease (Ngo et al., 2011 Brit J Hem, Vol. 156(2):259-264; Musallam et al., 2012 Blood). Accordingly, in the HPFH approach described here, base editing is used to recreate single base changes in the regulatory region of both gamma globin genes (HBG1 and HBG2) that disrupt repressor binding and lead to increased expression of fetal hemoglobin (HbF). Beta-thalassemia or sickle cell disease patients naturally harboring these variants are often asymptomatic or experience a milder form of the disease. Base editing followed by in vitro erythroid differentiation of CD34+ cells from both healthy donors and sickle trait donors led to HbF levels of greater than 60%, which is expected to be clinically relevant.

### Hb G-Makassar

[0767] Directly correcting the Glu6Val mutation of SCD has been a recent goal of genetic therapies designed for the SCD population. Current base editing technology cannot yet convert mutations like those that result from the A-T transversion in sickle beta globin; however, ABE variants have been designed to recognize and edit the opposite stranded adenine residue of valine. This results in the conversion of valine to alanine and the production of a naturally occurring variant known as Hb G-Makassar. Beta globin with alanine at this position does not contribute to polymer formation, and patients with Hb G-Makassar are asymptomatic in that they present with normal hematological parameters and red blood cell morphology.

[0768] ABE base editors, such as the ABE8s described herein (see, e.g., Table 7, Table 14 and FIGS. 36A-36C; 37-39) were used to directly convert the sickle cell disease-causing point mutation (E6V) into an asymptomatic, naturally-occurring variant (E6A), also known as Hb G-Makassar. Individuals harboring the Hb G-Makassar variant do not have polymerization (sickling) and are otherwise asymptomatic. SCD patient fibroblasts edited with these ABE variants achieve up to 70 percent conversion of the target adenine (FIG. 32A). CD34+ cells from healthy donors were then edited with a lead ABE variant, targeting a synonymous mutation in an adjacent proline that resides within the editing window and serves as a proxy for editing the SCD mutation. The average editing frequency was 40 percent (FIG. 32B). In addition, greater than 50% of base editing at position 9G was achieved at 96 hours post-electroporation. (FIG. 40. FIGS. 43A and 43B; and FIGS. 44A and 44B). Donor myeloid chimerism documented at these levels in the allogeneic transplant setting exceeds the 20 percent that is required for reversing the sickle phenotype (Fitzhugh et al, 2017 Blood).

[0769] Following base editing of the HbS target site with base editors comprising adenosine deaminase variants, e.g., ABE8, as described herein using cells (CD34+) from an SCD patient sample (homozygous or heterozygous HbSS samples) and analysis of the edited sample by UHPLC, distinct peaks delineated the Hb-G-Makassar variant globin from the HbS globin variant (FIGS. 41A, 45, 46A and 47), which resulted from direct conversion of the sickle cell disease-causing point mutation (E6V) into an asymptomatic, naturally-occurring variant (E6A) in the cells. Based on molecular weights in an edited heterozygous sample, the different beta globin (Hb) variants that corresponded to the Val→Ala substitution were distinguishable by UHPLC. LC-MS analysis of the edit peak also showed the presence of the distinct beta globin variants. (FIGS. 41B, 46B and 47B). The UHPLC and LC-MS analyses detected editing from the mutant HbS sickle cell point mutation (E6V) to the asymptomatic Hb G-Makassar variant (E6A), thus demonstrating successful editing of a pathogenic sickle cell variant (HbS) to the asymptomatic, nonpathogenic Hb G-Makassar variant.

[0770] For HPFH editing studies, a suitable gRNA sequence (5′ to 3′) is represented by the following sequence:

(SEQ ID NO: 175)
mCsmUsmUsGACCAAUAGCCUUGACAGUUUUAGAGCUAGAAAUAGCAAGU
UAAAAUAAGGCUAGUCCGUUAUCAACUUGAAAAAGUGGCACCGAGUCGGU
GCUsmUsmUsmU

In the above sequence, modifications are as follows: “mC” is 2′-O-methylcytidine; “mU” is 2′-O-methyluradine; and “s” indicates position of a phosphorothioate. It will be appreciated that the code for modifications is not standard. Accordingly, separate codes are typically used for the Makassar and the HPFH sgRNA guide sequences. Alternatively, the HPFH sequence with the same nomenclature as that of the Makassar sequence is as follows:

(SEQ ID NO: 176)
csususGACCAAUAGCCUUGACAGUUUUAGAGCUAGAAAUAGCAAGUUAA
AAUAAGGCUAGUCCGUUAUCAACUUGAAAAAGUGGCACCGAGUCGGUGCU
sususu

The target sequence, including edited bases 5 and 8 (in bold) and PAM (SEQ ID NO: 177):

| 1 | 2 | 3 | 4 | 5 | 6 | 7 | 8 | 9 | 10 | 11 | 12 | 13 | 14 | 15 | 16 | 17 | 18 | 19 | 20 | PAM |
|---|---|---|---|---|---|---|---|---|---|---|---|---|---|---|---|---|---|---|---|---|
| C | T | T | G | A | C | C | A | A | T | A | G | C | C | T | T | G | A | C | A | AGG |

### Example 4: Reduction of HbS and Upregulation of HbF in SCD CD34+ Cells

[0771] CD34+ cells from a patient having SCD were transfected with ABE8.8 mRNA and sgRNA (HBG1/2, 50 nM) using electroporation. Edited cells were differentiated to erythroid cells in vitro. The editing rate at HBG1/2 promoters was measured by Next-Genome Sequencing (NGS). 16.5% editing by the ABE8.8 base editor was observed at 48 hours post differentiation, and 89.2% editing was measured on day 14 post differentiation (FIG. 34A). The breakdown of bystander editing at 48 hours and on day 14 post-differentiation is also shown (FIG. 34B).

[0772] The functional readout of HbF upregulation and HbS downregulation in SCD CD34+ cells subjected to editing is shown in FIGS. 35A-35D. Edited SCD CD34+ cells were differentiated to erythroid cells and globin levels were analyzed on day 18 post differentiation. Globin levels in erythroid cells differentiated from unedited SCD CD34+ cells were assessed by UHPLC. FIG. 35B shows globin levels in erythroid cells differentiated from edited SCD CD34+ cells. 63.2% of γ globin level was detected in erythroid cells differentiated from edited SCD CD34+ cells versus unedited cells (FIG. 35C). S globin was reduced from 86% to 32.9% differentiated from edited SCD CD34+ cells versus unedited cells (FIG. 35D). The upregulation of fetal hemoglobin is an approach that is advantageous for the treatment of SCD as well as beta-thalassemia.

### Example 5: Materials and Methods

### General Methods:

[0773] All cloning was conducted via USER enzyme (New England Biolabs) cloning methods (see Geu-Flores et al., USER fusion: a rapid and efficient method for simultaneous fusion and cloning of multiple PCR products. Nucleic Acids Res 35, e55, doi:10.1093/nar/gkm106 (2007)) and templates for PCR amplification were purchased as bacterial or mammalian codon optimized gene fragments (GeneArt). Vectors created were transformed into Mach T1^{R} Competent Cells (ThermoFisher Scientific) and maintained at −80 C for long-term storage. All primers used in this work were purchased from Integrated DNA Technologies and PCRS were carried out using either Phusion U DNA Polymerase Green MultiPlex PCR Master Mix (ThermoFisher) or Q5 Hot Start High-Fidelity 2x Master Mix (New England Biolabs). All plasmids used in this work were freshly prepared from 50 mL of Mach1 culture using ZymoPURE Plasmid Midiprep (Zymo Research Corporation) which involves an endotoxin removal procedure. Molecular biology grade, Hyclone water (GE Healthcare Life Sciences) was used in all assays, transfections, and PCR reactions to ensure exclusion of DNAse activity.

[0774] Amino acid sequences of sgRNAs used for Hek293T mammalian cell transfection are provided in Table 17 below. The 20-nt target protospacer is shown in bold font. When a target DNA sequence did not start with a ‘G,’ a ‘G’ was added to the 5′ end of the primer since it has been established that the human U6 promoter prefers a ‘G’ at the transcription start site (see Cong, L. et al., Multiplex genome engineering using CRISPR/Cas systems. Science 339, 819-823, doi:10.1126/science.1231143 (2013)). The pFYF sgRNA plasmid described previously was used as a template for PCR amplification.

TABLE 17
Sequences of sgRNAs used for Hek293T mammalian cell transfection.

| Site | RNA protospacer sequence | Cas9 scaffold | JAM |
|---|---|---|---|
| 1 | GAACACAAAGCAUAGACUGC (SEQ ID | S. pyogenes | NGG |
| | NO: 178) | | |
| 2 | GGGAAAGACCCAGCAUCCGU (SEQ ID | S. pyogenes | NGG |
| | NO: 179) | | |
| 3 | GCUCCCAUCACAUCAACCGG (SEQ ID | S. pyogenes | NGG |
| | NO: 180) | | |
| 4 | GGUGAGUGAGUGUGUGCGUG (SEQ | S. pyogenes | NGG |
| | ID NO: 181) | | |
| 5 | GGCUUCAGGUUCUAAAUGAG (SEQ ID | S. pyogenes | NGG |
| | NO: 182) | | |
| 6 | GCAGAGAGUCGCCGUCUCCA (SEQ ID | S. pyogenes | NGG |
| | NO: 183) | | |
| 7 | GUGUAAGACCUCAAAAGCAC (SEQ ID | S. pyogenes | NGG |
| | NO: 184) | | |
| 8 | GAUGAGAAGGAGAAGUUCUU (SEQ ID | S. pyogenes | NGG |
| | NO: 185) | | |
| 9 | GAGGACAAAGUACAAACGGC (SEQ ID | S. pyogenes | AGA |
| | NO: 186) | | |
| 10 | GCCACCACAGGGAAGCUGGG (SEQ ID | S. pyogenes | TGA |
| | NO: 187) | | |
| 11 | GCUCUCAGGCCCUGUCCGCA (SEQ ID | S. pyogenes | CGT |
| | NO: 188) | | |
| 12 | GAGCAAAUACCAGAGAUAAG (SEQ ID | S. pyogenes | AGA |
| | NO: 189) | | |
| 13 | GAUCAGGAAAUAGAGCCACA (SEQ ID | S. pyogenes | GGC |
| | NO: 190) | | |
| 14 | GCCCAUCCCUGAGUCCAGCG (SEQ ID | S. pyogenes | AGC |
| | NO: 191) | | |
| 15 | GAACACGAAGACAUCUGAAGGUA | S. aureus | TTGAAT |
| | (SEQ ID NO: 192) | | |
| 16 | GAUUUACAGCCUGGCCUUUGGGG | S. aureus | TCGGGT |
| | (SEQ ID NO: 193) | | |
| 17 | GGAGAGAAAGAGAAGUUGAUUG | S. aureus | ATGGGT |
| | (SEQ ID NO: 194) | | |
| 18 | GAGGGUGAGGGAUGAGAUAAUG | S. aureus | ATGAGT |
| | (SEQ ID NO: 195) | | |
| 19 | GGUGGAGGAGGGUGCAUGGGGU | S. aureus | CAGAAT |
| | (SEQ ID NO: 196) | | |
| 20 | GCUGUUGCAUGAGGAAAGGGAC | S. aureus | TAGAGT |
| | (SEQ ID NO: 197) | | |
| HEK2 | GAACACAAAGCAUAGACUGC (SEQ ID | S. pyogenes | CGG |
| | NO: 178) | | |
| HEK3 | GGCCCAGACUGAGCACGUGA (SEQ ID | S. pyogenes | TGG |
| | NO: 198) | | |
| HEK4 | GGCACUGCGGCUGGAGGUGG (SEQ | S. pyogenes | GGG |
| | ID NO: 199) | | |
| LDLR | GCAGAGCACUGGAAUUCGUCA (SEQ | S. pyogenes | GGG |
| | ID NO: 200) | | |

sgRNA scaffold sequences are as follows:
S. pyogenes:

(SEQ ID NO: 201)
GUUUUAGAGCUAGAAAUAGCAAGUUAAAAUAAGGCUAGUCCGUUAUCAAC
UUGAAAAAGUGGCACCGAGUCGGUGC

S. aureus:

(SEQ ID NO: 202)
GUUUUAGUACUCUGUAAUGAAAAUUACAGAAUCUACUAAAACAAGGCAA
AAUGCCGUGUUUAUCUCGUCAACUUGUUGGCGAGA

### Generation of Input Bacterial TadA* Libraries for Directed Evolution

[0775] The TadA*8.0 library was designed to encode all 20 amino acids at each amino acid position in the TadA*7.10 open reading frame (Gaudelli, N. M. et al., Programmable base editing of A*T to G*C in genomic DNA without DNA cleavage. Nature 551, 464-471, doi:10.1038/nature24644 (2017)). Each TadA*8.0 library member contained about 1-2 new coding mutations and was chemically synthesized and purchased from Ranomics Inc (Toronto, Canada). The TadA*8.0 library was PCR amplified with Phusion U Green MultiPlex PCR Master Mix and USER-assembled into a bacterial vector optimized for ABE directed evolution (Gaudelli, N. M. et al., Programmable base editing of A*T to G*C in genomic DNA without DNA cleavage. Nature 551, 464-471, doi:10.1038/nature24644 (2017)).

### Bacterial Evolution of TadA Variants

[0776] Directed evolution of ABE containing the TadA*8 library was conducted as previously described (Gaudelli, N. M. et al., Programmable base editing of A*T to G*C in genomic DNA without DNA cleavage. Nature 551, 464-471, doi:10.1038/nature24644 (2017)) with the following changes: i) E. coli 10 betas (New England Biolabs) were used as the evolution host; and ii) survival on kanamycin relied on correction of three genetic inactivating components (e.g. survival required reversion of two stop mutations and one active site mutation in kanamycin). The kanamycin resistance gene sequence contains selection mutations for ABE8 evolution. After overnight co-culturing of selection plasmid and editor in 10 beta host cells, the library cultures were plated on 2xYT-agar medium supplemented with plasmid maintenance antibiotic and increasing concentrations of selection antibiotic, kanamycin (64-512 μg/mL). Bacteria were allowed to grow for 1 day and the TadA*8 portion of the surviving clones were Sanger sequenced after enrichment. Identified TadA*8 mutations of interest were then were then incorporated into mammalian expression vector via USER assembly.

### General HEK293T and RPMI-8226 Mammalian Culture Conditions

[0777] Cells were cultured at 37° C. with 5% CO₂. HEK293T cells [CLBTx013, American Type Cell Culture Collection (ATCC)] were cultured in Dulbecco's modified Eagles medium plus Glutamax (10566-016, Thermo Fisher Scientific) with 10% (v/v) fetal bovine serum (A31606-02, Thermo Fisher Scientific). RPMI-8226 (CCL-155, ATCC) cells were cultured in RPMI-1640 medium (Gibco) with 10% (v/v) fetal bovine serum (Gibco). Cells were tested negative for mycoplasma after receipt from supplier.

Hek293T Plasmid Transfection and gDNA Extraction

[0778] HEK293T cells were seeded onto 48-well well Poly-D-Lysine treated BioCoat plates (Corning) at a density of 35,000 cells/well and transfected 18-24 hours after plating. Cells were counted using a NucleoCounter NC-200 (Chemometec). To these cells were added 750 ng of base editor or nuclease control, 250 ng of sgRNA, and 10 ng of GFP-max plasmid (Lonza) diluted to 12.5 μL total volume in Opti-MEM reduced serum media (ThermoFisher Scientific). The solution was combined with 1.5 μL of Lipofectamine 2000 (ThermoFisher) in 11 μL of Opti-MEM reduced serum media and left to rest at room temperature for 15 min. The entire 25 μL mixture was then transferred to the pre-seeded Hek293T cells and left to incubate for about 120 h. Following incubation, media was aspirated and cells were washed two times with 250 μL of 1x PBS solution (ThermoFisher Scientific) and 100 μL of freshly prepared lysis buffer was added (100 mM Tris-HCl, pH 7.0, 0.05% SDS, 25 μg/mL Proteinase K (Thermo Fisher Scientific). Transfection plates containing lysis buffer were incubated at 37° C. for 1 hour and the mixture was transferred to a 96-well PCR plate and heated at 80° C. for 30 min.

### Analysis of DNA and RNA Off-Target Editing for ABE Architecture and ABE8 Constructs

[0779] HEK293T cells were plated on 48-well poly-D-lysine coated plates (Corning) 16 to 20 hours before lipofection at a density of 30,000 cells per well in DMEM+Glutamax medium (Thermo Fisher Scientific) without antibiotics. 750 ng nickase or base editor expression plasmid DNA was combined with 250 ng of sgRNA expression plasmid DNA in 15 μl OPTIMEM+Glutamax. This was combined with 10 μl of lipid mixture, comprising 1.5 μl Lipofectamine 2000 and 8.5 μl OPTIMEM+Glutamax per well. Cells were harvested 3 days after transfection and either DNA or RNA was harvested. For DNA analysis, cells were washed once in 1×PBS, and then lysed in 100 μl QuickExtract™ Buffer (Lucigen) according to the manufacturer's instructions. For RNA harvest, the MagMAX™ mirVana™ Total RNA Isolation Kit (Thermo Fisher Scientific) was used with the KingFisher™ Flex Purification System according to the manufacturer's instructions.

[0780] Targeted RNA sequencing was performed largely as previously described (see Rees, H. A. et al., Analysis and minimization of cellular RNA editing by DNA adenine base editors. Sci Adv 5, eaax5717, doi:10.1126/sciadv.aax5717 (2019)). cDNA was prepared from the isolated RNA using the SuperScript IV One-Step RT-PCR System with EZDnase (Thermo Fisher Scientific) according to the manufacturer's instructions. The following program was used: 58° C. for 12 min; 98° C. for 2 min; followed by PCR cycles which varied by amplicon: for CTNNB1 and IP90: 32 cycles of [98° C. for 10 sec; 60° C. for 10 sec; 72° C. for 30 sec] and for RSL1D135 cycles of [98° C. for 10 sec; 58° C. for 10 sec; 72° C. for 30 sec]. No RT controls were run concurrently with the samples. Following the combined RT-PCR, amplicons were barcoded and sequenced using an Illumina Miseq as described above. The first 125nt in each amplicon, beginning at the first base after the end of the forward primer in each amplicon, was aligned to a reference sequence and used for mean and maximum A-to-I frequencies in each amplicon (FIGS. 33A and 33B).

[0781] Off-target DNA sequencing was performed using previously published primers (see Komor, A. C. et al., Programmable editing of a target base in genomic DNA without double-stranded DNA cleavage. Nature 533, 420-424, doi:10.1038/nature17946 (2016); Rees, H. A. et al., Analysis and minimization of cellular RNA editing by DNA adenine base editors. Sci Adv 5, eaax5717, doi:10.1126/sciadv.aax5717 (2019)) listed in Table 18 below using a two-step PCR and barcoding method to prepare samples for sequencing using Illumina Miseq sequencers as above.

TABLE 18
HTS Primers used to amplify genomic sites:

| Primer Name | Sevence |
|---|---|
| fwd_site_1 | ACACTCTTTCCCTACACGACGCTCTTCCGATCTNNNNCCAGCCCCATCTGTC |
| | AAACT (SEQ ID NO: 203) |
| rev_site_1 | TGGAGTTCAGACGTGTGCTCTTCCGATCTTGAATGGATTCCTTGGAAACAAT |
| | GA (SEQ ID NO: 204) |
| fwd_site_2 | ACACTCTTTCCCTACACGACGCTCTTCCGATCTNNNNTGAGGGAGAGCCGTG |
| | TAGTT (SEQ ID NO: 205) |
| rev_site_2 | TGGAGTTCAGACGTGTGCTCTTCCGATCTGCCTCTCAAAGTGCTGGGAT |
| | (SEQ ID NO: 206) |
| fwd_site_3 | ACACTCTTTCCCTACACGACGCTCTTCCGATCTNNNNCCATCAGGCTCTCAG |
| | CTCAG (SEQ ID NO: 207) |
| rev_site_3 | TGGAGTTCAGACGTGTGCTCTTCCGATCTCTCGTGGGTTTGTGGTTGC |
| | (SEQ ID NO: 208) |
| fwd_site_4 | ACACTCTTTCCCTACACGACGCTCTTCCGATCTNNNNGCCCATTCCCTCTTT |
| | AGCCA (SEQ ID NO: 209) |
| rev_site_4 | TGGAGTTCAGACGTGTGCTCTTCCGATCTGAGCCGTTCCCTCTTTGCTA |
| | (SEQ ID NO: 210) |
| fwd_site_5 | ACACTCTTTCCCTACACGACGCTCTTCCGATCTNNNNAACCTGTGTGACACT |
| | TGGCA (SEQ ID NO: 211) |
| rev_site_5 | TGGAGTTCAGACGTGTGCTCTTCCGATCTGTCTGGCCCAAGATCACACA |
| | (SEQ ID NO: 212) |
| fwd_site_6 | ACACTCTTTCCCTACACGACGCTCTTCCGATCTNNNCACGGATAAAGACGCT |
| | GGGA (SEQ ID NO: 213) |
| rev_site_6 | TGGAGTTCAGACGTGTGCTCTTCCGATCTGGGGTCCCAGGTGCTGAC (SEQ |
| | ID NO: 214) |
| fwd_site_7 | ACACTCTTTCCCTACACGACGCTCTTCCGATCTNNNTTGATTGTCTCCTTTG |
| | CCGC (SEQ ID NO: 215) |
| rev_site_7 | TGGAGTTCAGACGTGTGCTCTTCCGATCTTGACCCAGTGTTTGATAGATCAG |
| | T (SEQ ID NO: 216) |
| fwd_site_8 | ACACTCTTTCCCTACACGACGCTCTTCCGATCTNNNCACCCCTTCAGTCCAT |
| | GCTT (SEQ ID NO: 217) |
| rev_site_8 | TGGAGTTCAGACGTGTGCTCTTCCGATCTTCTGATGGGGAGGAACGAGT |
| | (SEQ ID NO: 218) |
| fwd_site_9 | ACACTCTTTCCCTACACGACGCTCTTCCGATCTNNNNCAGCTCAGCCTGAGT |
| | GTTGA (SEQ ID NO: 219) |
| rev_site_9 | TGGAGTTCAGACGTGTGCTCTTCCGATCTGCCCACCCTAGTCATTGGAG |
| | (SEQ ID NO: 220) |
| fwd_site_10 | ACACTCTTTCCCTACACGACGCTCTTCCGATCTNNNNGTCAGAGGGACACAC |
| | TGTGG (SEQ ID NO: 221) |
| rev_site_10 | TGGAGTTCAGACGTGTGCTCTTCCGATCTCACACTCACTCACCCACACA |
| | (SEQ ID NO: 222) |
| fwd_site_11 | ACACTCTTTCCCTACACGACGCTCTTCCGATCTNNNNTGTGTGGGTGAGTGA |
| | GTGTG (SEQ ID NO: 223) |
| rev_site_11 | TGGAGTTCAGACGTGTGCTCTTCCGATCTCACCAAGGTTCACAGCCTGA |
| | (SEQ ID NO: 224) |
| fwd_site_12 | ACACTCTTTCCCTACACGACGCTCTTCCGATCTNNNNTTGTCTCTGCCTGTA |
| | GCTGC (SEQ ID NO: 225) |
| rev_site_12 | TGGAGTTCAGACGTGTGCTCTTCCGATCTCGCTCTGGGCTTCATCTTCA |
| | (SEQ ID NO: 226) |
| fwd_site_13 | ACACTCTTTCCCTACACGACGCTCTTCCGATCTNNNNTGGGATTATGGGTGT |
| | GAGCC (SEQ ID NO: 227) |
| rev_site_13 | TGGAGTTCAGACGTGTGCTCTTCCGATCTTGCCTTCCTCCTCTCTCTCC |
| | (SEQ ID NO: 228) |
| fwd_site_14 | ACACTCTTTCCCTACACGACGCTCTTCCGATCTNNNNTGCAGACCAGATTCG |
| | GAGAA (SEQ ID NO: 229) |
| rev_site_14 | TGGAGTTCAGACGTGTGCTCTTCCGATCTGTTCAGTTTCCAGGGGGTCC |
| | (SEQ ID NO: 230) |
| fwd_site_15 | ACACTCTTTCCCTACACGACGCTCTTCCGATCTNNNNTCCGCACAGCCTTAG |
| | TTCAA (SEQ ID NO: 231) |
| rev_site_15 | TGGAGTTCAGACGTGTGCTCTTCCGATCTAACTTGAAGAGACGGCAGCA |
| | (SEQ ID NO: 232) |
| fwd_site_16 | ACACTCTTTCCCTACACGACGCTCTTCCGATCTNNNNCCCCCAGCTACAGAA |
| | AGGTC (SEQ ID NO: 233) |
| rev_site_16 | TGGAGTTCAGACGTGTGCTCTTCCGATCTATTTCCACCGCAAAATGGCC |
| | (SEQ ID NO: 234) |
| fwd_site_17 | ACACTCTTTCCCTACACGACGCTCTTCCGATCTNNNNTCACTTCAGCCCAGG |
| | AGTAT (SEQ ID NO: 235) |
| rev_site_17 | TGGAGTTCAGACGTGTGCTCTTCCGATCTTGTGTATGGTGAGAGGTAGGGA |
| | (SEQ ID NO: 236) |
| fwd_site_18 | ACACTCTTTCCCTACACGACGCTCTTCCGATCTNNNNGTCTGAGGTCACACA |
| | GTGGG (SEQ ID NO: 237) |
| rev_site_18 | TGGAGTTCAGACGTGTGCTCTTCCGATCTCTGAGAGCAGGGACCACATC |
| | (SEQ ID NO: 238) |
| fwd_site_19 | ACACTCTTTCCCTACACGACGCTCTTCCGATCTNNNNGGGAGGTGGAGAGAG |
| | GATGT (SEQ ID NO: 239) |
| rev_site_19 | TGGAGTTCAGACGTGTGCTCTTCCGATCTACTCTTCCTGAGGTCTAGGAACC |
| | CG (SEQ ID NO: 240) |
| fwd_site_20 | ACACTCTTTCCCTACACGACGCTCTTCCGATCTNNNNCCCTGTTCCTAAAGC |
| | CCACC (SEQ ID NO: 241) |
| rev_site_20 | TGGAGTTCAGACGTGTGCTCTTCCGATCTACTCTCTGGTTCTGTTTGTGGCC |
| | A (SEQ ID NO: 242) |
| fwd_CTNNB1 | ACACTCTTTCCCTACACGACGCTCTTCCGATCTNNNNATTTGATGGAGTTGG |
| | ACATGGCC (SEQ ID NO: 243) |
| rev_CTNNB1 | TGGAGTTCAGACGTGTGCTCTCCAGCTACTTGTTCTTGAGTGAAGG (SEQ |
| | ID NO: 244) |
| fwd_RSL1D1 | ACACTCTTTCCCTACACGACGCTCTTCCGATCTNNNNTGGCTTTCCAAATCA |
| | GTGGGTC (SEQ ID NO: 245) |
| rev_RSL1D1 | TGGAGTTCAGACGTGTGCTCTTCCGATCTCTCATAAGCTTAGACCAACAAGC |
| | (SEQ ID NO: 246) |
| fwd_IP90 | ACACTCTTTCCCTACACGACGCTCTTCCGATCTNNNNCTGGTTGACCAATCT |
| | GTGGTG (SEQ ID NO: 247) |
| rev_IP90 | TGGAGTTCAGACGTGTGCTCTCTGCGTCTGGATCAGGTACG (SEQ ID |
| | NO: 248) |
| fwd_HEK293_site2_ | ACACTCTTTCCCTACACGACGCTCTTCCGATCTNNNNGTGTGGAGAGTGAGT |
| off1 | AAGCCA (SEQ ID NO: 249) |
| rev_HEK293_site2_ | TGGAGTTCAGACGTGTGCTCTTCCGATCTACGGTAGGATGATTTCAGGCA |
| off1 | (SEQ ID NO: 250) |
| fwd_HEK293_site2_ | ACACTCTTTCCCTACACGACGCTCTTCCGATCTNNNNCACAAAGCAGTGTAG |
| off2 | CTCAGG (SEQ ID NO: 251) |
| rev_HEK293_site2_ | TGGAGTTCAGACGTGTGCTCTTCCGATCTTTTTTGGTACTCGAGTGTTATTC |
| off2 | AG (SEQ ID NO: 252) |
| fwd_HEK293_site3_ | ACACTCTTTCCCTACACGACGCTCTTCCGATCTNNNNTCCCCTGTTGACCTG |
| off1 | GAGAA (SEQ ID NO: 253) |
| rev_HEK293_site3_ | TGGAGTTCAGACGTGTGCTCTTCCGATCTCACTGTACTTGCCCTGACCA |
| off1 | (SEQ ID NO: 254) |
| fwd_HEK293_site3_ | ACACTCTTTCCCTACACGACGCTCTTCCGATCTNNNNTTGGTGTTGACAGGG |
| off2 | AGCAA (SEQ ID NO: 255) |
| rev_HEK293_site3_ | TGGAGTTCAGACGTGTGCTCTTCCGATCTCTGAGATGTGGGCAGAAGGG |
| off2 | (SEQ ID NO: 256) |
| fwd_HEK293_site3_ | ACACTCTTTCCCTACACGACGCTCTTCCGATCTNNNNTGAGAGGGAACAGAA |
| off3 | GGGCT (SEQ ID NO: 257) |
| rev_HEK293_site3_ | TGGAGTTCAGACGTGTGCTCTTCCGATCTGTCCAAAGGCCCAAGAACCT |
| off3 | (SEQ ID NO: 258) |
| fwd_HEK293_site3_ | ACACTCTTTCCCTACACGACGCTCTTCCGATCTNNNNTCCTAGCACTTTGGA |
| off4 | AGGTCG (SEQ ID NO: 259) |
| rev_HEK293_site3_ | TGGAGTTCAGACGTGTGCTCTTCCGATCTGCTCATCTTAATCTGCTCAGCC |
| off4 | (SEQ ID NO: 260) |
| fwd_HEK293_site3_ | ACACTCTTTCCCTACACGACGCTCTTCCGATCTNNNNAAAGGAGCAGCTCTT |
| off5 | CCTGG (SEQ ID NO: 261) |
| rev_HEK293_site3_ | TGGAGTTCAGACGTGTGCTCTTCCGATCTGTCTGCACCATCTCCCACAA |
| off5 | (SEQ ID NO: 262) |
| fwd_HEK293_site4_ | ACACTCTTTCCCTACACGACGCTCTTCCGATCTNNNNGGCATGGCTTCTGAG |
| off1 | ACTCA (SEQ ID NO: 263) |
| rev_HEK293_site4_ | TGGAGTTCAGACGTGTGCTCTTCCGATCTGTCTCCCTTGCACTCCCTGTCTT |
| off1 | T (SEQ ID NO: 264) |
| fwd_HEK293_site4_ | ACACTCTTTCCCTACACGACGCTCTTCCGATCTNNNNTTTGGCAATGGAGGC |
| off2 | ATTGG (SEQ ID NO: 265) |
| rev_HEK293_site4_ | TGGAGTTCAGACGTGTGCTCTTCCGATCTGAAGAGGCTGCCCATGAGAG |
| off2 | (SEQ ID NO: 266) |
| fwd_HEK293_site4_ | ACACTCTTTCCCTACACGACGCTCTTCCGATCTNNNNGGTCTGAGGCTCGAA |
| off3 | TCCTG (SEQ ID NO: 267) |
| rev_HEK293_site4_ | TGGAGTTCAGACGTGTGCTCTTCCGATCTCTGTGGCCTCCATATCCCTG |
| off3 | (SEQ ID NO: 268) |
| fwd_HEK293_site4_ | ACACTCTTTCCCTACACGACGCTCTTCCGATCTNNNNTTTCCACCAGAACTC |
| off4 | AGCCC (SEQ ID NO: 269) |
| rev_HEK293_site4_ | TGGAGTTCAGACGTGTGCTCTTCCGATCTCCTCGGTTCCTCCACAACAC |
| off4 | (SEQ ID NO: 270) |
| fwd_HEK293_site4_ | ACACTCTTTCCCTACACGACGCTCTTCCGATCTNNNNCACGGGAAGGACAGG |
| off5 | AGAAG (SEQ ID NO: 271) |
| rev_HEK293_site4_ | TGGAGTTCAGACGTGTGCTCTTCCGATCTGCAGGGGAGGGATAAAGCAG |
| off5 | (SEQ ID NO: 272) |
| fwd_HEK_site_3 | ACACTCTTTCCCTACACGACGCTCTTCCGATCTNNNNGGAAACGCCCATGCA |
| | ATTAGTC (SEQ ID NO: 273) |
| rev_HEK_site_3 | TGGAGTTCAGACGTGTGCTCTTCCGATCTCTTGTCAACCAGTATCCCGGTG |
| | (SEQ ID NO: 274) |
| fwd_HEK_site_2 | ACACTCTTTCCCTACACGACGCTCTTCCGATCTNNNNTGAATGGATTCCTTG |
| | GAAACAATG (SEQ ID NO: 275) |
| rev_HEK_site_2 | TGGAGTTCAGACGTGTGCTCTTCCGATCTCCAGCCCCATCTGTCAAACT |
| | (SEQ ID NO: 276) |
| fwd_HEK_site_4 | TGGAGTTCAGACGTGTGCTCTTCCGATCTTCCTTTCAACCCGAACGGAG |
| | (SEQ ID NO: 277) |
| rev_HEK_site_4 | ACACTCTTTCCCTACACGACGCTCTTCCGATCTNNNNGCTGGTCTTCTTTCC |
| | CCTCC (SEQ ID NO: 278) |
| fwd_LDLR | ACACTCTTTCCCTACACGACGCTCTTCCGATCTNNNNGCCCTGCTTCTTTTT |
| | CTCTGGT (SEQ ID NO: 279) |
| rev_LDLR | TGGAGTTCAGACGTGTGCTCTTCCGATCTACCATTAACGCAGCCAACTTCA |
| | (SEQ ID NO: 280) |
| fwd_TRAC | ACACTCTTTCCCTACACGACGCTCTTCCGATCTCATGAGGTCTATGGACTTC |
| | AAGAGCAA (SEQ ID NO: 281) |
| Rev_TRAC | TGGAGTTCAGACGTGTGCTCTTCCGATCTCATCATTGACCAGAGCTCTGGGC |
| | AGAA (SEQ ID NO: 282) |
| fwd_CBLB | ACACTCTTTCCCTACACGACGCTCTTCCGATCTGCACTTACCAGCATTACTT |
| | CCTAAACC (SEQ ID NO: 283) |
| Rev_CBLB | TGGAGTTCAGACGTGTGCTCTTCCGATCTATGGGCTCCACTTTTCAGCTCTG |
| | TAA (SEQ ID NO: 284) |
| fwd_CD7 | ACACTCTTTCCCTACACGACGCTCTTCCGATCTCAGTTCAGGCACATGTAGG |
| | AGGGA (SEQ ID NO: 285) |
| Rev_CD7 | TGGAGTTCAGACGTGTGCTCTTCCGATCTACCGCCTGCAGCTGTCGGACACT |
| | GGCA (SEQ ID NO: 286) |
| fwd_B2M | ACACTCTTTCCCTACACGACGCTCTTCCGATCTAAAAGATGAGTATGCCTGC |
| | CGTG (SEQ ID NO: 287) |
| Rev_B2M | TGGAGTTCAGACGTGTGCTCTTCCGATCTCAGATTGTTTATATCAGATGGGA |
| | TGGG (SEQ ID NO: 288) |
| fwd_CIITA | ACACTCTTTCCCTACACGACGCTCTTCCGATCTATGCAAGTTTGGTCCTGAG |
| | CCCTCCC (SEQ ID NO: 289) |
| Rev_CITTA | TGGAGTTCAGACGTGTGCTCTTCCGATCTGATGTGGGTTCCCTGCGCTCTGC |
| | A (SEQ ID NO: 290) |
| fwd_PDCD1 | ACACTCTTTCCCTACACGACGCTCTTCCGATCTCCAGGGACTGAGGGTGGAA |
| | GGTCC (SEQ ID NO: 291) |
| Rev_PDCD1 | TGGAGTTCAGACGTGTGCTCTTCCGATCTACCTCCGCCTGAGCAGTGGAGAA |
| | (SEQ ID NO: 292) |

mRNA Production for ABE Editors Used in CD34+ Cells

[0782] All adenine base editor mRNA was generated using the following synthesis protocol. Editors were cloned into a plasmid encoding a dT7 promoter followed by a 5′UTR, Kozak sequence, ORF, and 3′UTR. The dT7 promoter carries an inactivating point mutation within the T7 promoter that prevents transcription from circular plasmid. This plasmid templated a PCR reaction (Q5 Hot Start 2X Master Mix), in which the forward primer corrected the SNP within the T7 promoter and the reverse primer appended a polyA tail to the 3′ UTR. The resulting PCR product was purified on a Zymo Research 25 μg DCC column and used as mRNA template in the subsequent in vitro transcription. The NEB HiScribe High-Yield Kit was used according to the instruction manual, but with full substitution of N1-methyl-pseudouridine for uridine and co-transcriptional capping with CleanCap AG (Trilink). Reaction cleanup was performed by lithium chloride precipitation. Primers used for amplification can be found in Table 18.

[0783] The Cas9 mRNA used here was purchased from Trilink (CleanCap Cas9 mRNA 5moU) and the CBE mRNA used in the whole genome sequencing experiment was generated in-house.

TABLE 19
Primers used for ABE8 T7 in vitro transcription reactions

| Name | Sequence |
|---|---|
| fwd_IVT | TCGAGCTCGGTACCTAATACGACTCAC (SEQ ID NO: 293) |
| rev_IVT | TTTTTTTTTTTTTTTTTTTTTTTTTTTTTTTTTTTTTTTTTTTTTTTTTTTTTTTTTTTT |
| | TTTTTTTTTTTTTTTTTTTTTTTTTTTTTTTTTTTTTTTTTTTTTTTTTTTTTTTTTTTT |
| | CTTCCTACTCAGGCTTTATTCAAAGACCA (SEQ ID NO: 294) |

### CD34+ Cell Preparation

[0784] Mobilized peripheral blood was obtained and enriched for Human CD34+ HSPCs and frozen in single-use aliquots (HemaCare, M001F-GCSF/MOZ-2). The CD34+ cells were thawed and put into X-VIVO 10 (Lonza) containing 1% Glutamax (Gibco), 100 ng/mL of TPO (Peprotech), SCF (Peprotech) and Flt-3 (Peprotech) and cultured for 48 hours prior to electroporation.

### Electroporation of CD34+ Cells

[0785] 48 hours post thaw, the cells were centrifuged to remove the X-VIVO 10 medium and washed in MaxCyte buffer (HyClone) with 0.1% HSA (Akron Biotechnologies). The cells were then resuspended in cold MaxCyte buffer at 1,250,000 cells per mL and split into multiple 204 aliquots. The ABE mRNA (0.15 μM) and −198 HBG1/2 sgRNA (4.05 μM) were then aliquoted as per the experimental conditions and raised to a total of 54 in MaxCyte buffer. 204 of cells was the added into the 5 μL RNA mixture in groups of 3 and loaded into each chamber of an OC25x3 MaxCyte cuvette for electroporation. After receiving the charge, 254 was collected from the chambers and placed in the center of the wells in a 24-well untreated tissue culture plate. The cells recovered for 20 minutes in an incubator (37° C., 5% CO₂). After the 20 minute recovery, X-VIVO 10 medium containing 1% Glutamax, 100 ng/mL of TPO, SCF and Flt-3 was added to the cells for a concentration of 1,000,000 cells per mL. The cells were then left to further recover in an incubator (37° C., 5% CO₂) for 48 hrs.

### Erythrocyte Differentiation Post ABE Electroporation

[0786] Following 48 h post electroporation rest (day 0 of culture), the cells were centrifuged and moved to “Phase 1” IMDM media (ATCC) containing 5% human serum, 330 μg/mL transferrin (Sigma), 10 μg/mL human insulin (Sigma), 2U/mL heparin sodium (Sigma), 3U/mL EPO (Peprotech), 100 ng/mL SCF (Peprotech), 5 μg/mL IL3 and 50 μM hydrocortisone (Sigma) at 20,000 cells per mL. On day 4 of culture, the cells were fed 4x volume of the same media. On day 7, the cells were spun down and moved to “Phase 2” IMDM media containing 5% human serum (Sigma), 330 μg/mL transferrin, 10 μg/mL human insulin, 2U/mL heparin sodium, 3U/mL EPO and 100 ng/mL SCF at 200,000 cells per mL. On day 11, cells were centrifuged and moved to “Phase 3” IMDM media containing 5% human serum, 330 μg/mL of transferrin, 10μ.g/mL human insulin, 2U/mL of heparin sodium and 3 U/mL of EPO at 1,000,000 cells per mL. On day 14, the cells were centrifuged and resuspended in the same media as used on day 11, but at 5,000,000 cells per mL. On day 18, the differentiated red blood cells were collected in 500,000 cell aliquots, washed once in 5004 DPBS (Gibco) and frozen at −80° C. for 24 hours before UHPLC processing.

### Preparation of Red Blood Cell Sample for UHPLC Analysis

[0787] Frozen red blood cell pellets were thawed at room temperature. Pellets were diluted to a final concentration of 5×10⁴ cells/4 with ACK lysis buffer. Samples were mixed by pipette and incubated at room temperate for 5 min. Samples were then frozen in at −80° C. for 5 min, allowed to thaw, and mixed by pipette prior to centrifugation at 6,700g for 10 min. The supernatant was carefully removed (without disturbing cell debris pellet), transferred to a new plate in which a 10-fold dilution in ultrapure water was done for UHPLC analysis.

### Ultra-High Performance Liquid Chromatography (UHPLC) Analysis

[0788] Reverse-phase separation of globin chains was performed using a UHPLC system configured with a binary pump and UV detector (Thermo Fisher Scientific, Vanquish Horizon). The Waters AQUITY Peptide BEH C18 VanGuard pre-column (2.1×5 mm, 1.7 μm beads, 300 Å pore size) followed by ACQUITY Peptide BEH C18 Column (2.1×150 mm, 1.7 μm beads, 300 Å pore size) (Waters Corp) were used for the separation with a column temperature of 60° C. Elution was performed using 0.1% trifluoroacetic acid (TFA) in water (A) and 0.08% TFA in acetonitrile (B) with a flow rate of 0.25 mL/min. Separation of the globin chains was achieved using a linear gradient of 40-52% B 0-10 min; 52-40% B 10-10.5 min; and 40% B to 12 min. Sample injection volume was 104. UV spectra at a wavelength of 220 nm with a data rate of 5 Hz was collected throughout the analysis. Globin chain identities were confirmed through LC/MS analysis of hemoglobin standards.

### Genomic DNA Extraction for CD34+ Cells

[0789] Following ABE electroporation (e.g., 48h later), an aliquot of cells was cultured in X-VIVO 10 media (Lonza) containing 1% Glutamax (Gibco), 100 ng/mL of TPO (Peprotech), SCF (Peprotech) and Flt-3 (Peprotech). Following 48 h and 144 h post culturing, 100,000 cells were collected and centrifuged. 50 μL of Quick Extract (Lucigen) was added to the cell pellet and the cell mixture was transferred to a 96-well PCR plate (Bio-Rad). The lysate was heated for 15 minutes at 65° C., followed by 10 minutes at 98° C. The cell lysates were stored at −20° C.

### Other Embodiments

[0790] From the foregoing description, it will be apparent that variations and modifications may be made to the invention described herein to adopt it to various usages and conditions. Such embodiments are also within the scope of the following claims.

[0791] The recitation of a listing of elements in any definition of a variable herein includes definitions of that variable as any single element or combination (or subcombination) of listed elements. The recitation of an embodiment herein includes that embodiment as any single embodiment or in combination with any other embodiments or portions thereof.

[0792] All publications, patents, and patent applications mentioned in this specification are herein incorporated by reference to the same extent as if each individual publication, patent, or patent application was specifically and individually indicated to be incorporated by reference. Absent any indication otherwise, publications, patents, and patent applications mentioned in this specification are incorporated herein by reference in their entireties.

The application's sequence listing, which the Patent Office published only in electronic form, follows.

SEQUENCE LISTING (389 sequences)

SEQ ID NO: 1 - protein, 167 aa, Artificial Sequence
  Description of artificial sequence: synthetic polypeptide sequence
MSEVEFSHEYWMRHALTLAKRARDEREVPVGAVLVLNNRVIGEGWNRAIGLHDPTAHAEIMALRQGGLVMQNYRLYDATLYSTFEPCVMCAGAMIHSRIGRVVFGVRNAKTGAAGSLMDVLHHPGMNHRVEITEGILADECAALLCRFFRMPRRVFNAQKKAQSSTD

SEQ ID NO: 2 - protein, 167 aa, Escherichia coli
  misc_feature (1)..(167): TadA*7.10 (ecTadA) polypeptide sequence
MSEVEFSHEYWMRHALTLAKRARDEREVPVGAVLVLNNRVIGEGWNRAIGLHDPTAHAEIMALRQGGLVMQNYRLIDATLYVTFEPCVMCAGAMIHSRIGRVVFGVRNAKTGAAGSLMDVLHYPGMNHRVEITEGILADECAALLCYFFRMPRQVFNAQKKAQSSTD

SEQ ID NO: 3 - DNA, 4092 bp, Artificial Sequence
  Description of artificial sequence: BhCas12b GGSGGS-ABE8-Xten20 at P153 polynucleotide sequence
  misc_feature (1)..(6): Kozak sequence
  misc_feature (7)..(57): Sequence encoding N-terminal nuclear localization signal
  misc_feature (58)..(513): Sequence encoding BhCas12b
  misc_feature (514)..(531): Sequence encoding a linker
  misc_feature (532)..(1029): Sequence encoding TadA*8
  misc_feature (1030)..(1089): Sequence encoding Xten20 linker
  misc_feature (1090)..(3954): Sequence encoding BhCas12b
  misc_feature (3955)..(4002): Sequence encoding C-terminal NLS
  misc_feature (4003)..(4008): Seqquence encoding GS linker
  misc_feature (4009)..(4089): Sequence encoding 3x hemagglutinin (HA) tag
gccaccatggccccaaagaagaagcggaaggtcggtatccacggagtcccagcagccgccaccagatccttcatcctgaagatcgagcccaacgaggaagtgaagaaaggcctctggaaaacccacgaggtgctgaaccacggaatcgcctactacatgaatatcctgaagctgatccggcaagaggccatctacgagcaccacgagcaggaccccaagaatcccaagaaggtgtccaaggccgagatccaggccgagctgtgggatttcgtgctgaagatgcagaagtgcaacagcttcacacacgaggtggacaaggacgaggtgttcaacatcctgagagagctgtacgaggaactggtgcccagcagcgtggaaaagaagggcgaagccaaccagctgagcaacaagtttctgtaccctctggtggaccccaacagccagtctggaaagggaacagccagcagcggcagaaagcccagatggtacaacctgaagattgccggcgatcccggaggctctggaggaagctccgaagtcgagttttcccatgagtactggatgagacacgcattgactctcgcaaagagggctcgagatgaacgcgaggtgcccgtgggggcagtactcgtgctcaacaatcgcgtaatcggcgaaggttggaatagggcaatcggactccacgaccccactgcacatgcggaaatcatggcccttcgacagggagggcttgtgatgcagaattatcgactttatgatgcgacgctgtacgtcacgtttgaaccttgcgtaatgtgcgcgggagctatgattcactcccgcattggacgagttgtattcggtgttcgcaacgccaagacgggtgccgcaggttcactgatggacgtgctgcatcatccaggcatgaaccaccgggtagaaatcacagaaggcatattggcggacgaatgtgcggcgctgttgtgtcgtttttttcgcatgcccaggcgggtctttaacgcccagaaaaaagcacaatcctctactgacggctcttctggatctgaaacacctggcacaagcgagagcgccacccctgagagctctggctcctgggaagaagagaagaagaagtgggaagaagataagaaaaaggacccgctggccaagatcctgggcaagctggctgagtacggactgatccctctgttcatcccctacaccgacagcaacgagcccatcgtgaaagaaatcaagtggatggaaaagtcccggaaccagagcgtgcggcggctggataaggacatgttcattcaggccctggaacggttcctgagctgggagagctggaacctgaaagtgaaagaggaatacgagaaggtcgagaaagagtacaagaccctggaagagaggatcaaagaggacatccaggctctgaaggctctggaacagtatgagaaagagcggcaagaacagctgctgcgggacaccctgaacaccaacgagtaccggctgagcaagagaggccttagaggctggcgggaaatcatccagaaatggctgaaaatggacgagaacgagccctccgagaagtacctggaagtgttcaaggactaccagcggaagcaccctagagaggccggcgattacagcgtgtacgagttcctgtccaagaaagagaaccacttcatctggcggaatcaccctgagtacccctacctgtacgccaccttctgcgagatcgacaagaaaaagaaggacgccaagcagcaggccaccttcacactggccgatcctatcaatcaccctctgtgggtccgattcgaggaaagaagcggcagcaacctgaacaagtacagaatcctgaccgagcagctgcacaccgagaagctgaagaaaaagctgacagtgcagctggaccggctgatctaccctacagaatctggcggctgggaagagaagggcaaagtggacattgtgctgctgcccagccggcagttctacaaccagatcttcctggacatcgaggaaaagggcaagcacgccttcacctacaaggatgagagcatcaagttccctctgaagggcacactcggcggagccagagtgcagttcgacagagatcacctgagaagataccctcacaaggtggaaagcggcaacgtgggcagaatctacttcaacatgaccgtgaacatcgagcctacagagtccccagtgtccaagtctctgaagatccaccgggacgacttccccaaggtggtcaacttcaagcccaaagaactgaccgagtggatcaaggacagcaagggcaagaaactgaagtccggcatcgagtccctggaaatcggcctgagagtgatgagcatcgacctgggacagagacaggccgctgccgcctctattttcgaggtggtggatcagaagcccgacatcgaaggcaagctgtttttcccaatcaagggcaccgagctgtatgccgtgcacagagccagcttcaacatcaagctgcccggcgagacactggtcaagagcagagaagtgctgcggaaggccagagaggacaatctgaaactgatgaaccagaagctcaacttcctgcggaacgtgctgcacttccagcagttcgaggacatcaccgagagagagaagcgggtcaccaagtggatcagcagacaagagaacagcgacgtgcccctggtgtaccaggatgagctgatccagatccgcgagctgatgtacaagccttacaaggactgggtcgccttcctgaagcagctccacaagagactggaagtcgagatcggcaaagaagtgaagcactggcggaagtccctgagcgacggaagaaagggcctgtacggcatctccctgaagaacatcgacgagatcgatcggacccggaagttcctgctgagatggtccctgaggcctaccgaacctggcgaagtgcgtagactggaacccggccagagattcgccatcgaccagctgaatcacctgaacgccctgaaagaagatcggctgaagaagatggccaacaccatcatcatgcacgccctgggctactgctacgacgtgcggaagaagaaatggcaggctaagaaccccgcctgccagatcatcctgttcgaggatctgagcaactacaacccctacgaggaaaggtcccgcttcgagaacagcaagctcatgaagtggtccagacgcgagatccccagacaggttgcactgcagggcgagatctatggcctgcaagtgggagaagtgggcgctcagttcagcagcagattccacgccaagacaggcagccctggcatcagatgtagcgtcgtgaccaaagagaagctgcaggacaatcggttcttcaagaatctgcagagagagggcagactgaccctggacaaaatcgccgtgctgaaagagggcgatctgtacccagacaaaggcggcgagaagttcatcagcctgagcaaggatcggaagtgcgtgaccacacacgccgacatcaacgccgctcagaacctgcagaagcggttctggacaagaacccacggcttctacaaggtgtactgcaaggcctaccaggtggacggccagaccgtgtacatccctgagagcaaggaccagaagcagaagatcatcgaagagttcggcgagggctacttcattctgaaggacggggtgtacgaatgggtcaacgccggcaagctgaaaatcaagaagggcagctccaagcagagcagcagcgagctggtggatagcgacatcctgaaagacagcttcgacctggcctccgagctgaaaggcgaaaagctgatgctgtacagggaccccagcggcaatgtgttccccagcgacaaatggatggccgctggcgtgttcttcggaaagctggaacgcatcctgatcagcaagctgaccaaccagtactccatcagcaccatcgaggacgacagcagcaagcagtctatgaaaaggccggcggccacgaaaaaggccggccaggcaaaaaagaaaaagggatcctacccatacgatgttccagattacgcttatccctacgacgtgcctgattatgcatacccatatgatgtccccgactatgcctaa

SEQ ID NO: 4 - protein, 1361 aa, Artificial Sequence
  Description of artificial sequence: BhCas12b GGSGGS-ABE8-Xten20 at P153 polypeptide sequence
MAPKKKRKVGIHGVPAAATRSFILKIEPNEEVKKGLWKTHEVLNHGIAYYMNILKLIRQEAIYEHHEQDPKNPKKVSKAEIQAELWDFVLKMQKCNSFTHEVDKDEVFNILRELYEELVPSSVEKKGEANQLSNKFLYPLVDPNSQSGKGTASSGRKPRWYNLKIAGDPGGSGGSSEVEFSHEYWMRHALTLAKRARDEREVPVGAVLVLNNRVIGEGWNRAIGLHDPTAHAEIMALRQGGLVMQNYRLYDATLYVTFEPCVMCAGAMIHSRIGRVVFGVRNAKTGAAGSLMDVLHHPGMNHRVEITEGILADECAALLCRFFRMPRRVFNAQKKAQSSTDGSSGSETPGTSESATPESSGSWEEEKKKWEEDKKKDPLAKILGKLAEYGLIPLFIPYTDSNEPIVKEIKWMEKSRNQSVRRLDKDMFIQALERFLSWESWNLKVKEEYEKVEKEYKTLEERIKEDIQALKALEQYEKERQEQLLRDTLNTNEYRLSKRGLRGWREIIQKWLKMDENEPSEKYLEVFKDYQRKHPREAGDYSVYEFLSKKENHFIWRNHPEYPYLYATFCEIDKKKKDAKQQATFTLADPINHPLWVRFEERSGSNLNKYRILTEQLHTEKLKKKLTVQLDRLIYPTESGGWEEKGKVDIVLLPSRQFYNQIFLDIEEKGKHAFTYKDESIKFPLKGTLGGARVQFDRDHLRRYPHKVESGNVGRIYFNMTVNIEPTESPVSKSLKIHRDDFPKVVNFKPKELTEWIKDSKGKKLKSGIESLEIGLRVMSIDLGQRQAAAASIFEVVDQKPDIEGKLFFPIKGTELYAVHRASFNIKLPGETLVKSREVLRKAREDNLKLMNQKLNFLRNVLHFQQFEDITEREKRVTKWISRQENSDVPLVYQDELIQIRELMYKPYKDWVAFLKQLHKRLEVEIGKEVKHWRKSLSDGRKGLYGISLKNIDEIDRTRKFLLRWSLRPTEPGEVRRLEPGQRFAIDQLNHLNALKEDRLKKMANTIIMHALGYCYDVRKKKWQAKNPACQIILFEDLSNYNPYEERSRFENSKLMKWSRREIPRQVALQGEIYGLQVGEVGAQFSSRFHAKTGSPGIRCSVVTKEKLQDNRFFKNLQREGRLTLDKIAVLKEGDLYPDKGGEKFISLSKDRKCVTTHADINAAQNLQKRFWTRTHGFYKVYCKAYQVDGQTVYIPESKDQKQKIIEEFGEGYFILKDGVYEWVNAGKLKIKKGSSKQSSSELVDSDILKDSFDLASELKGEKLMLYRDPSGNVFPSDKWMAAGVFFGKLERILISKLTNQYSISTIEDDSSKQSMKRPAATKKAGQAKKKKGSYPYDVPDYAYPYDVPDYAYPYDVPDYA

SEQ ID NO: 5 - DNA, 4092 bp, Artificial Sequence
  Description of artificial sequence: BhCas12b GGSGGS-ABE8-Xten20 at K255 polynucleotide sequence
  misc_feature (1)..(6): Kozak sequence
  misc_feature (7)..(57): Sequence encoding N-terminal nuclear localization signal (NLS)
  misc_feature (58)..(822): Sequence encoding BhCas12b
  misc_feature (823)..(840): Sequence encoding a linker
  misc_feature (841)..(1338): Sequence encoding TadA*8
  misc_feature (1339)..(1398): Sequence encoding Xten20 linker
  misc_feature (1399)..(3954): Sequence encoding BhCas12b
  misc_feature (3955)..(4002): Sequence encoding C-terminal NLS
  misc_feature (4003)..(4008): Sequence encoding a GS linker
  misc_feature (4009)..(4089): Sequence encoding 3x hemagglutinin (HA) tag
gccaccatggccccaaagaagaagcggaaggtcggtatccacggagtcccagcagccgccaccagatccttcatcctgaagatcgagcccaacgaggaagtgaagaaaggcctctggaaaacccacgaggtgctgaaccacggaatcgcctactacatgaatatcctgaagctgatccggcaagaggccatctacgagcaccacgagcaggaccccaagaatcccaagaaggtgtccaaggccgagatccaggccgagctgtgggatttcgtgctgaagatgcagaagtgcaacagcttcacacacgaggtggacaaggacgaggtgttcaacatcctgagagagctgtacgaggaactggtgcccagcagcgtggaaaagaagggcgaagccaaccagctgagcaacaagtttctgtaccctctggtggaccccaacagccagtctggaaagggaacagccagcagcggcagaaagcccagatggtacaacctgaagattgccggcgatccctcctgggaagaagagaagaagaagtgggaagaagataagaaaaaggacccgctggccaagatcctgggcaagctggctgagtacggactgatccctctgttcatcccctacaccgacagcaacgagcccatcgtgaaagaaatcaagtggatggaaaagtcccggaaccagagcgtgcggcggctggataaggacatgttcattcaggccctggaacggttcctgagctgggagagctggaacctgaaagtgaaagaggaatacgagaaggtcgagaaagagtacaagaccctggaagagaggatcaaaggaggctctggaggaagctccgaagtcgagttttcccatgagtactggatgagacacgcattgactctcgcaaagagggctcgagatgaacgcgaggtgcccgtgggggcagtactcgtgctcaacaatcgcgtaatcggcgaaggttggaatagggcaatcggactccacgaccccactgcacatgcggaaatcatggcccttcgacagggagggcttgtgatgcagaattatcgactttatgatgcgacgctgtacgtcacgtttgaaccttgcgtaatgtgcgcgggagctatgattcactcccgcattggacgagttgtattcggtgttcgcaacgccaagacgggtgccgcaggttcactgatggacgtgctgcatcatccaggcatgaaccaccgggtagaaatcacagaaggcatattggcggacgaatgtgcggcgctgttgtgtcgtttttttcgcatgcccaggcgggtctttaacgcccagaaaaaagcacaatcctctactgacggctcttctggatctgaaacacctggcacaagcgagagcgccacccctgagagctctggcgaggacatccaggctctgaaggctctggaacagtatgagaaagagcggcaagaacagctgctgcgggacaccctgaacaccaacgagtaccggctgagcaagagaggccttagaggctggcgggaaatcatccagaaatggctgaaaatggacgagaacgagccctccgagaagtacctggaagtgttcaaggactaccagcggaagcaccctagagaggccggcgattacagcgtgtacgagttcctgtccaagaaagagaaccacttcatctggcggaatcaccctgagtacccctacctgtacgccaccttctgcgagatcgacaagaaaaagaaggacgccaagcagcaggccaccttcacactggccgatcctatcaatcaccctctgtgggtccgattcgaggaaagaagcggcagcaacctgaacaagtacagaatcctgaccgagcagctgcacaccgagaagctgaagaaaaagctgacagtgcagctggaccggctgatctaccctacagaatctggcggctgggaagagaagggcaaagtggacattgtgctgctgcccagccggcagttctacaaccagatcttcctggacatcgaggaaaagggcaagcacgccttcacctacaaggatgagagcatcaagttccctctgaagggcacactcggcggagccagagtgcagttcgacagagatcacctgagaagataccctcacaaggtggaaagcggcaacgtgggcagaatctacttcaacatgaccgtgaacatcgagcctacagagtccccagtgtccaagtctctgaagatccaccgggacgacttccccaaggtggtcaacttcaagcccaaagaactgaccgagtggatcaaggacagcaagggcaagaaactgaagtccggcatcgagtccctggaaatcggcctgagagtgatgagcatcgacctgggacagagacaggccgctgccgcctctattttcgaggtggtggatcagaagcccgacatcgaaggcaagctgtttttcccaatcaagggcaccgagctgtatgccgtgcacagagccagcttcaacatcaagctgcccggcgagacactggtcaagagcagagaagtgctgcggaaggccagagaggacaatctgaaactgatgaaccagaagctcaacttcctgcggaacgtgctgcacttccagcagttcgaggacatcaccgagagagagaagcgggtcaccaagtggatcagcagacaagagaacagcgacgtgcccctggtgtaccaggatgagctgatccagatccgcgagctgatgtacaagccttacaaggactgggtcgccttcctgaagcagctccacaagagactggaagtcgagatcggcaaagaagtgaagcactggcggaagtccctgagcgacggaagaaagggcctgtacggcatctccctgaagaacatcgacgagatcgatcggacccggaagttcctgctgagatggtccctgaggcctaccgaacctggcgaagtgcgtagactggaacccggccagagattcgccatcgaccagctgaatcacctgaacgccctgaaagaagatcggctgaagaagatggccaacaccatcatcatgcacgccctgggctactgctacgacgtgcggaagaagaaatggcaggctaagaaccccgcctgccagatcatcctgttcgaggatctgagcaactacaacccctacgaggaaaggtcccgcttcgagaacagcaagctcatgaagtggtccagacgcgagatccccagacaggttgcactgcagggcgagatctatggcctgcaagtgggagaagtgggcgctcagttcagcagcagattccacgccaagacaggcagccctggcatcagatgtagcgtcgtgaccaaagagaagctgcaggacaatcggttcttcaagaatctgcagagagagggcagactgaccctggacaaaatcgccgtgctgaaagagggcgatctgtacccagacaaaggcggcgagaagttcatcagcctgagcaaggatcggaagtgcgtgaccacacacgccgacatcaacgccgctcagaacctgcagaagcggttctggacaagaacccacggcttctacaaggtgtactgcaaggcctaccaggtggacggccagaccgtgtacatccctgagagcaaggaccagaagcagaagatcatcgaagagttcggcgagggctacttcattctgaaggacggggtgtacgaatgggtcaacgccggcaagctgaaaatcaagaagggcagctccaagcagagcagcagcgagctggtggatagcgacatcctgaaagacagcttcgacctggcctccgagctgaaaggcgaaaagctgatgctgtacagggaccccagcggcaatgtgttccccagcgacaaatggatggccgctggcgtgttcttcggaaagctggaacgcatcctgatcagcaagctgaccaaccagtactccatcagcaccatcgaggacgacagcagcaagcagtctatgaaaaggccggcggccacgaaaaaggccggccaggcaaaaaagaaaaagggatcctacccatacgatgttccagattacgcttatccctacgacgtgcctgattatgcatacccatatgatgtccccgactatgcctaa

SEQ ID NO: 6 - protein, 1361 aa, Artificial Sequence
  Description of artificial sequence: BhCas12b GGSGGS-ABE8-Xten20 at K255 polypeptide sequence
MAPKKKRKVGIHGVPAAATRSFILKIEPNEEVKKGLWKTHEVLNHGIAYYMNILKLIRQEAIYEHHEQDPKNPKKVSKAEIQAELWDFVLKMQKCNSFTHEVDKDEVFNILRELYEELVPSSVEKKGEANQLSNKFLYPLVDPNSQSGKGTASSGRKPRWYNLKIAGDPSWEEEKKKWEEDKKKDPLAKILGKLAEYGLIPLFIPYTDSNEPIVKEIKWMEKSRNQSVRRLDKDMFIQALERFLSWESWNLKVKEEYEKVEKEYKTLEERIKGGSGGSSEVEFSHEYWMRHALTLAKRARDEREVPVGAVLVLNNRVIGEGWNRAIGLHDPTAHAEIMALRQGGLVMQNYRLYDATLYVTFEPCVMCAGAMIHSRIGRVVFGVRNAKTGAAGSLMDVLHHPGMNHRVEITEGILADECAALLCRFFRMPRRVFNAQKKAQSSTDGSSGSETPGTSESATPESSGEDIQALKALEQYEKERQEQLLRDTLNTNEYRLSKRGLRGWREIIQKWLKMDENEPSEKYLEVFKDYQRKHPREAGDYSVYEFLSKKENHFIWRNHPEYPYLYATFCEIDKKKKDAKQQATFTLADPINHPLWVRFEERSGSNLNKYRILTEQLHTEKLKKKLTVQLDRLIYPTESGGWEEKGKVDIVLLPSRQFYNQIFLDIEEKGKHAFTYKDESIKFPLKGTLGGARVQFDRDHLRRYPHKVESGNVGRIYFNMTVNIEPTESPVSKSLKIHRDDFPKVVNFKPKELTEWIKDSKGKKLKSGIESLEIGLRVMSIDLGQRQAAAASIFEVVDQKPDIEGKLFFPIKGTELYAVHRASFNIKLPGETLVKSREVLRKAREDNLKLMNQKLNFLRNVLHFQQFEDITEREKRVTKWISRQENSDVPLVYQDELIQIRELMYKPYKDWVAFLKQLHKRLEVEIGKEVKHWRKSLSDGRKGLYGISLKNIDEIDRTRKFLLRWSLRPTEPGEVRRLEPGQRFAIDQLNHLNALKEDRLKKMANTIIMHALGYCYDVRKKKWQAKNPACQIILFEDLSNYNPYEERSRFENSKLMKWSRREIPRQVALQGEIYGLQVGEVGAQFSSRFHAKTGSPGIRCSVVTKEKLQDNRFFKNLQREGRLTLDKIAVLKEGDLYPDKGGEKFISLSKDRKCVTTHADINAAQNLQKRFWTRTHGFYKVYCKAYQVDGQTVYIPESKDQKQKIIEEFGEGYFILKDGVYEWVNAGKLKIKKGSSKQSSSELVDSDILKDSFDLASELKGEKLMLYRDPSGNVFPSDKWMAAGVFFGKLERILISKLTNQYSISTIEDDSSKQSMKRPAATKKAGQAKKKKGSYPYDVPDYAYPYDVPDYAYPYDVPDYA

SEQ ID NO: 7 - DNA, 4092 bp, Artificial Sequence
  Description of artificial sequence: BhCas12b GGSGGS-ABE8-Xten20 at D306 polynucleotide sequence
  misc_feature (1)..(6): Kozak sequence
  misc_feature (7)..(57): Sequence encoding N-terminal nuclear localization signal (NLS)
  misc_feature (58)..(975): Sequence encoding BhCas12b
  misc_feature (976)..(993): Sequence encoding a linker
  misc_feature (994)..(1491): Sequence encoding TadA*8
  misc_feature (1492)..(1551): Sequence encoding Xten20 linker
  misc_feature (1552)..(3954): Sequence encoding BhCas12b
  misc_feature (3955)..(4002): Sequence encoding C-terminal NLS
  misc_feature (4003)..(4008): Sequence encoding a GS linker
  misc_feature (4009)..(4089): Sequence encoding 3x hemagglutinin (HA) tag
gccaccatggccccaaagaagaagcggaaggtcggtatccacggagtcccagcagccgccaccagatccttcatcctgaagatcgagcccaacgaggaagtgaagaaaggcctctggaaaacccacgaggtgctgaaccacggaatcgcctactacatgaatatcctgaagctgatccggcaagaggccatctacgagcaccacgagcaggaccccaagaatcccaagaaggtgtccaaggccgagatccaggccgagctgtgggatttcgtgctgaagatgcagaagtgcaacagcttcacacacgaggtggacaaggacgaggtgttcaacatcctgagagagctgtacgaggaactggtgcccagcagcgtggaaaagaagggcgaagccaaccagctgagcaacaagtttctgtaccctctggtggaccccaacagccagtctggaaagggaacagccagcagcggcagaaagcccagatggtacaacctgaagattgccggcgatccctcctgggaagaagagaagaagaagtgggaagaagataagaaaaaggacccgctggccaagatcctgggcaagctggctgagtacggactgatccctctgttcatcccctacaccgacagcaacgagcccatcgtgaaagaaatcaagtggatggaaaagtcccggaaccagagcgtgcggcggctggataaggacatgttcattcaggccctggaacggttcctgagctgggagagctggaacctgaaagtgaaagaggaatacgagaaggtcgagaaagagtacaagaccctggaagagaggatcaaagaggacatccaggctctgaaggctctggaacagtatgagaaagagcggcaagaacagctgctgcgggacaccctgaacaccaacgagtaccggctgagcaagagaggccttagaggctggcgggaaatcatccagaaatggctgaaaatggacggaggctctggaggaagctccgaagtcgagttttcccatgagtactggatgagacacgcattgactctcgcaaagagggctcgagatgaacgcgaggtgcccgtgggggcagtactcgtgctcaacaatcgcgtaatcggcgaaggttggaatagggcaatcggactccacgaccccactgcacatgcggaaatcatggcccttcgacagggagggcttgtgatgcagaattatcgactttatgatgcgacgctgtacgtcacgtttgaaccttgcgtaatgtgcgcgggagctatgattcactcccgcattggacgagttgtattcggtgttcgcaacgccaagacgggtgccgcaggttcactgatggacgtgctgcatcatccaggcatgaaccaccgggtagaaatcacagaaggcatattggcggacgaatgtgcggcgctgttgtgtcgtttttttcgcatgcccaggcgggtctttaacgcccagaaaaaagcacaatcctctactgacggctcttctggatctgaaacacctggcacaagcgagagcgccacccctgagagctctggcgagaacgagccctccgagaagtacctggaagtgttcaaggactaccagcggaagcaccctagagaggccggcgattacagcgtgtacgagttcctgtccaagaaagagaaccacttcatctggcggaatcaccctgagtacccctacctgtacgccaccttctgcgagatcgacaagaaaaagaaggacgccaagcagcaggccaccttcacactggccgatcctatcaatcaccctctgtgggtccgattcgaggaaagaagcggcagcaacctgaacaagtacagaatcctgaccgagcagctgcacaccgagaagctgaagaaaaagctgacagtgcagctggaccggctgatctaccctacagaatctggcggctgggaagagaagggcaaagtggacattgtgctgctgcccagccggcagttctacaaccagatcttcctggacatcgaggaaaagggcaagcacgccttcacctacaaggatgagagcatcaagttccctctgaagggcacactcggcggagccagagtgcagttcgacagagatcacctgagaagataccctcacaaggtggaaagcggcaacgtgggcagaatctacttcaacatgaccgtgaacatcgagcctacagagtccccagtgtccaagtctctgaagatccaccgggacgacttccccaaggtggtcaacttcaagcccaaagaactgaccgagtggatcaaggacagcaagggcaagaaactgaagtccggcatcgagtccctggaaatcggcctgagagtgatgagcatcgacctgggacagagacaggccgctgccgcctctattttcgaggtggtggatcagaagcccgacatcgaaggcaagctgtttttcccaatcaagggcaccgagctgtatgccgtgcacagagccagcttcaacatcaagctgcccggcgagacactggtcaagagcagagaagtgctgcggaaggccagagaggacaatctgaaactgatgaaccagaagctcaacttcctgcggaacgtgctgcacttccagcagttcgaggacatcaccgagagagagaagcgggtcaccaagtggatcagcagacaagagaacagcgacgtgcccctggtgtaccaggatgagctgatccagatccgcgagctgatgtacaagccttacaaggactgggtcgccttcctgaagcagctccacaagagactggaagtcgagatcggcaaagaagtgaagcactggcggaagtccctgagcgacggaagaaagggcctgtacggcatctccctgaagaacatcgacgagatcgatcggacccggaagttcctgctgagatggtccctgaggcctaccgaacctggcgaagtgcgtagactggaacccggccagagattcgccatcgaccagctgaatcacctgaacgccctgaaagaagatcggctgaagaagatggccaacaccatcatcatgcacgccctgggctactgctacgacgtgcggaagaagaaatggcaggctaagaaccccgcctgccagatcatcctgttcgaggatctgagcaactacaacccctacgaggaaaggtcccgcttcgagaacagcaagctcatgaagtggtccagacgcgagatccccagacaggttgcactgcagggcgagatctatggcctgcaagtgggagaagtgggcgctcagttcagcagcagattccacgccaagacaggcagccctggcatcagatgtagcgtcgtgaccaaagagaagctgcaggacaatcggttcttcaagaatctgcagagagagggcagactgaccctggacaaaatcgccgtgctgaaagagggcgatctgtacccagacaaaggcggcgagaagttcatcagcctgagcaaggatcggaagtgcgtgaccacacacgccgacatcaacgccgctcagaacctgcagaagcggttctggacaagaacccacggcttctacaaggtgtactgcaaggcctaccaggtggacggccagaccgtgtacatccctgagagcaaggaccagaagcagaagatcatcgaagagttcggcgagggctacttcattctgaaggacggggtgtacgaatgggtcaacgccggcaagctgaaaatcaagaagggcagctccaagcagagcagcagcgagctggtggatagcgacatcctgaaagacagcttcgacctggcctccgagctgaaaggcgaaaagctgatgctgtacagggaccccagcggcaatgtgttccccagcgacaaatggatggccgctggcgtgttcttcggaaagctggaacgcatcctgatcagcaagctgaccaaccagtactccatcagcaccatcgaggacgacagcagcaagcagtctatgaaaaggccggcggccacgaaaaaggccggccaggcaaaaaagaaaaagggatcctacccatacgatgttccagattacgcttatccctacgacgtgcctgattatgcatacccatatgatgtccccgactatgcctaa

SEQ ID NO: 8 - protein, 1361 aa, Artificial Sequence
  Description of artificial sequence: BhCas12b GGSGGS-ABE8-Xten20 at D306 polypeptide sequence
MAPKKKRKVGIHGVPAAATRSFILKIEPNEEVKKGLWKTHEVLNHGIAYYMNILKLIRQEAIYEHHEQDPKNPKKVSKAEIQAELWDFVLKMQKCNSFTHEVDKDEVFNILRELYEELVPSSVEKKGEANQLSNKFLYPLVDPNSQSGKGTASSGRKPRWYNLKIAGDPSWEEEKKKWEEDKKKDPLAKILGKLAEYGLIPLFIPYTDSNEPIVKEIKWMEKSRNQSVRRLDKDMFIQALERFLSWESWNLKVKEEYEKVEKEYKTLEERIKEDIQALKALEQYEKERQEQLLRDTLNTNEYRLSKRGLRGWREIIQKWLKMDGGSGGSSEVEFSHEYWMRHALTLAKRARDEREVPVGAVLVLNNRVIGEGWNRAIGLHDPTAHAEIMALRQGGLVMQNYRLYDATLYVTFEPCVMCAGAMIHSRIGRVVFGVRNAKTGAAGSLMDVLHHPGMNHRVEITEGILADECAALLCRFFRMPRRVFNAQKKAQSSTDGSSGSETPGTSESATPESSGENEPSEKYLEVFKDYQRKHPREAGDYSVYEFLSKKENHFIWRNHPEYPYLYATFCEIDKKKKDAKQQATFTLADPINHPLWVRFEERSGSNLNKYRILTEQLHTEKLKKKLTVQLDRLIYPTESGGWEEKGKVDIVLLPSRQFYNQIFLDIEEKGKHAFTYKDESIKFPLKGTLGGARVQFDRDHLRRYPHKVESGNVGRIYFNMTVNIEPTESPVSKSLKIHRDDFPKVVNFKPKELTEWIKDSKGKKLKSGIESLEIGLRVMSIDLGQRQAAAASIFEVVDQKPDIEGKLFFPIKGTELYAVHRASFNIKLPGETLVKSREVLRKAREDNLKLMNQKLNFLRNVLHFQQFEDITEREKRVTKWISRQENSDVPLVYQDELIQIRELMYKPYKDWVAFLKQLHKRLEVEIGKEVKHWRKSLSDGRKGLYGISLKNIDEIDRTRKFLLRWSLRPTEPGEVRRLEPGQRFAIDQLNHLNALKEDRLKKMANTIIMHALGYCYDVRKKKWQAKNPACQIILFEDLSNYNPYEERSRFENSKLMKWSRREIPRQVALQGEIYGLQVGEVGAQFSSRFHAKTGSPGIRCSVVTKEKLQDNRFFKNLQREGRLTLDKIAVLKEGDLYPDKGGEKFISLSKDRKCVTTHADINAAQNLQKRFWTRTHGFYKVYCKAYQVDGQTVYIPESKDQKQKIIEEFGEGYFILKDGVYEWVNAGKLKIKKGSSKQSSSELVDSDILKDSFDLASELKGEKLMLYRDPSGNVFPSDKWMAAGVFFGKLERILISKLTNQYSISTIEDDSSKQSMKRPAATKKAGQAKKKKGSYPYDVPDYAYPYDVPDYAYPYDVPDYA

SEQ ID NO: 9 - DNA, 4092 bp, Artificial Sequence
  Description of artificial sequence: BhCas12b GGSGGS-ABE8-Xten20 at D980 polynucleotide sequence
  misc_feature (1)..(6): Kozak sequence
  misc_feature (7)..(57): Sequence encoding N-terminal nuclear localization signal (NLS)
  misc_feature (58)..(2997): Sequence encoding BhCas12b
  misc_feature (2998)..(3015): Sequence encoding a linker
  misc_feature (3016)..(3513): Sequence encoding TadA*8
  misc_feature (3514)..(3573): Sequence encoding Xten20 linker
  misc_feature (3574)..(3954): Sequence encoding BhCas12b
  misc_feature (3955)..(4002): Sequence encoding C-terminal NLS
  misc_feature (4003)..(4008): Sequence encoding a GS linker
  misc_feature (4009)..(4089): Sequence encoding 3x hemagglutinin (HA) tag
gccaccatggccccaaagaagaagcggaaggtcggtatccacggagtcccagcagccgccaccagatccttcatcctgaagatcgagcccaacgaggaagtgaagaaaggcctctggaaaacccacgaggtgctgaaccacggaatcgcctactacatgaatatcctgaagctgatccggcaagaggccatctacgagcaccacgagcaggaccccaagaatcccaagaaggtgtccaaggccgagatccaggccgagctgtgggatttcgtgctgaagatgcagaagtgcaacagcttcacacacgaggtggacaaggacgaggtgttcaacatcctgagagagctgtacgaggaactggtgcccagcagcgtggaaaagaagggcgaagccaaccagctgagcaacaagtttctgtaccctctggtggaccccaacagccagtctggaaagggaacagccagcagcggcagaaagcccagatggtacaacctgaagattgccggcgatccctcctgggaagaagagaagaagaagtgggaagaagataagaaaaaggacccgctggccaagatcctgggcaagctggctgagtacggactgatccctctgttcatcccctacaccgacagcaacgagcccatcgtgaaagaaatcaagtggatggaaaagtcccggaaccagagcgtgcggcggctggataaggacatgttcattcaggccctggaacggttcctgagctgggagagctggaacctgaaagtgaaagaggaatacgagaaggtcgagaaagagtacaagaccctggaagagaggatcaaagaggacatccaggctctgaaggctctggaacagtatgagaaagagcggcaagaacagctgctgcgggacaccctgaacaccaacgagtaccggctgagcaagagaggccttagaggctggcgggaaatcatccagaaatggctgaaaatggacgagaacgagccctccgagaagtacctggaagtgttcaaggactaccagcggaagcaccctagagaggccggcgattacagcgtgtacgagttcctgtccaagaaagagaaccacttcatctggcggaatcaccctgagtacccctacctgtacgccaccttctgcgagatcgacaagaaaaagaaggacgccaagcagcaggccaccttcacactggccgatcctatcaatcaccctctgtgggtccgattcgaggaaagaagcggcagcaacctgaacaagtacagaatcctgaccgagcagctgcacaccgagaagctgaagaaaaagctgacagtgcagctggaccggctgatctaccctacagaatctggcggctgggaagagaagggcaaagtggacattgtgctgctgcccagccggcagttctacaaccagatcttcctggacatcgaggaaaagggcaagcacgccttcacctacaaggatgagagcatcaagttccctctgaagggcacactcggcggagccagagtgcagttcgacagagatcacctgagaagataccctcacaaggtggaaagcggcaacgtgggcagaatctacttcaacatgaccgtgaacatcgagcctacagagtccccagtgtccaagtctctgaagatccaccgggacgacttccccaaggtggtcaacttcaagcccaaagaactgaccgagtggatcaaggacagcaagggcaagaaactgaagtccggcatcgagtccctggaaatcggcctgagagtgatgagcatcgacctgggacagagacaggccgctgccgcctctattttcgaggtggtggatcagaagcccgacatcgaaggcaagctgtttttcccaatcaagggcaccgagctgtatgccgtgcacagagccagcttcaacatcaagctgcccggcgagacactggtcaagagcagagaagtgctgcggaaggccagagaggacaatctgaaactgatgaaccagaagctcaacttcctgcggaacgtgctgcacttccagcagttcgaggacatcaccgagagagagaagcgggtcaccaagtggatcagcagacaagagaacagcgacgtgcccctggtgtaccaggatgagctgatccagatccgcgagctgatgtacaagccttacaaggactgggtcgccttcctgaagcagctccacaagagactggaagtcgagatcggcaaagaagtgaagcactggcggaagtccctgagcgacggaagaaagggcctgtacggcatctccctgaagaacatcgacgagatcgatcggacccggaagttcctgctgagatggtccctgaggcctaccgaacctggcgaagtgcgtagactggaacccggccagagattcgccatcgaccagctgaatcacctgaacgccctgaaagaagatcggctgaagaagatggccaacaccatcatcatgcacgccctgggctactgctacgacgtgcggaagaagaaatggcaggctaagaaccccgcctgccagatcatcctgttcgaggatctgagcaactacaacccctacgaggaaaggtcccgcttcgagaacagcaagctcatgaagtggtccagacgcgagatccccagacaggttgcactgcagggcgagatctatggcctgcaagtgggagaagtgggcgctcagttcagcagcagattccacgccaagacaggcagccctggcatcagatgtagcgtcgtgaccaaagagaagctgcaggacaatcggttcttcaagaatctgcagagagagggcagactgaccctggacaaaatcgccgtgctgaaagagggcgatctgtacccagacaaaggcggcgagaagttcatcagcctgagcaaggatcggaagtgcgtgaccacacacgccgacatcaacgccgctcagaacctgcagaagcggttctggacaagaacccacggcttctacaaggtgtactgcaaggcctaccaggtggacggaggctctggaggaagctccgaagtcgagttttcccatgagtactggatgagacacgcattgactctcgcaaagagggctcgagatgaacgcgaggtgcccgtgggggcagtactcgtgctcaacaatcgcgtaatcggcgaaggttggaatagggcaatcggactccacgaccccactgcacatgcggaaatcatggcccttcgacagggagggcttgtgatgcagaattatcgactttatgatgcgacgctgtacgtcacgtttgaaccttgcgtaatgtgcgcgggagctatgattcactcccgcattggacgagttgtattcggtgttcgcaacgccaagacgggtgccgcaggttcactgatggacgtgctgcatcatccaggcatgaaccaccgggtagaaatcacagaaggcatattggcggacgaatgtgcggcgctgttgtgtcgtttttttcgcatgcccaggcgggtctttaacgcccagaaaaaagcacaatcctctactgacggctcttctggatctgaaacacctggcacaagcgagagcgccacccctgagagctctggcggccagaccgtgtacatccctgagagcaaggaccagaagcagaagatcatcgaagagttcggcgagggctacttcattctgaaggacggggtgtacgaatgggtcaacgccggcaagctgaaaatcaagaagggcagctccaagcagagcagcagcgagctggtggatagcgacatcctgaaagacagcttcgacctggcctccgagctgaaaggcgaaaagctgatgctgtacagggaccccagcggcaatgtgttccccagcgacaaatggatggccgctggcgtgttcttcggaaagctggaacgcatcctgatcagcaagctgaccaaccagtactccatcagcaccatcgaggacgacagcagcaagcagtctatgaaaaggccggcggccacgaaaaaggccggccaggcaaaaaagaaaaagggatcctacccatacgatgttccagattacgcttatccctacgacgtgcctgattatgcatacccatatgatgtccccgactatgcctaa

SEQ ID NO: 10 - protein, 1361 aa, Artificial Sequence
  Description of artificial sequence: BhCas12b GGSGGS-ABE8-Xten20 at D980 polypeptide sequence
MAPKKKRKVGIHGVPAAATRSFILKIEPNEEVKKGLWKTHEVLNHGIAYYMNILKLIRQEAIYEHHEQDPKNPKKVSKAEIQAELWDFVLKMQKCNSFTHEVDKDEVFNILRELYEELVPSSVEKKGEANQLSNKFLYPLVDPNSQSGKGTASSGRKPRWYNLKIAGDPSWEEEKKKWEEDKKKDPLAKILGKLAEYGLIPLFIPYTDSNEPIVKEIKWMEKSRNQSVRRLDKDMFIQALERFLSWESWNLKVKEEYEKVEKEYKTLEERIKEDIQALKALEQYEKERQEQLLRDTLNTNEYRLSKRGLRGWREIIQKWLKMDENEPSEKYLEVFKDYQRKHPREAGDYSVYEFLSKKENHFIWRNHPEYPYLYATFCEIDKKKKDAKQQATFTLADPINHPLWVRFEERSGSNLNKYRILTEQLHTEKLKKKLTVQLDRLIYPTESGGWEEKGKVDIVLLPSRQFYNQIFLDIEEKGKHAFTYKDESIKFPLKGTLGGARVQFDRDHLRRYPHKVESGNVGRIYFNMTVNIEPTESPVSKSLKIHRDDFPKVVNFKPKELTEWIKDSKGKKLKSGIESLEIGLRVMSIDLGQRQAAAASIFEVVDQKPDIEGKLFFPIKGTELYAVHRASFNIKLPGETLVKSREVLRKAREDNLKLMNQKLNFLRNVLHFQQFEDITEREKRVTKWISRQENSDVPLVYQDELIQIRELMYKPYKDWVAFLKQLHKRLEVEIGKEVKHWRKSLSDGRKGLYGISLKNIDEIDRTRKFLLRWSLRPTEPGEVRRLEPGQRFAIDQLNHLNALKEDRLKKMANTIIMHALGYCYDVRKKKWQAKNPACQIILFEDLSNYNPYEERSRFENSKLMKWSRREIPRQVALQGEIYGLQVGEVGAQFSSRFHAKTGSPGIRCSVVTKEKLQDNRFFKNLQREGRLTLDKIAVLKEGDLYPDKGGEKFISLSKDRKCVTTHADINAAQNLQKRFWTRTHGFYKVYCKAYQVDGGSGGSSEVEFSHEYWMRHALTLAKRARDEREVPVGAVLVLNNRVIGEGWNRAIGLHDPTAHAEIMALRQGGLVMQNYRLYDATLYVTFEPCVMCAGAMIHSRIGRVVFGVRNAKTGAAGSLMDVLHHPGMNHRVEITEGILADECAALLCRFFRMPRRVFNAQKKAQSSTDGSSGSETPGTSESATPESSGGQTVYIPESKDQKQKIIEEFGEGYFILKDGVYEWVNAGKLKIKKGSSKQSSSELVDSDILKDSFDLASELKGEKLMLYRDPSGNVFPSDKWMAAGVFFGKLERILISKLTNQYSISTIEDDSSKQSMKRPAATKKAGQAKKKKGSYPYDVPDYAYPYDVPDYAYPYDVPDYA

SEQ ID NO: 11 - DNA, 4092 bp, Artificial Sequence
  Description of artificial sequence: BhCas12b GGSGGS-ABE8-Xten20 at K1019 polynucleotide sequence
  misc_feature (1)..(6): Kozak sequence
  misc_feature (7)..(57): Sequence encoding N-terminal nuclear localization signal (NLS)
  misc_feature (58)..(3114): Sequence encoding BhCas12b
  misc_feature (3115)..(3132): Sequence encoding a linker
  misc_feature (3133)..(3630): Sequence encoding TadA*8
  misc_feature (3631)..(3690): Sequence encoding Xten20 linker
  misc_feature (3691)..(3954): Sequence encoding BhCas12b
  misc_feature (3955)..(4002): Sequence encoding C-terminal NLS
  misc_feature (4003)..(4008): Sequence encoding GS linker
  misc_feature (4009)..(4089): Sequence encoding 3x hemagglutinin (HA) tag
gccaccatggccccaaagaagaagcggaaggtcggtatccacggagtcccagcagccgccaccagatccttcatcctgaagatcgagcccaacgaggaagtgaagaaaggcctctggaaaacccacgaggtgctgaaccacggaatcgcctactacatgaatatcctgaagctgatccggcaagaggccatctacgagcaccacgagcaggaccccaagaatcccaagaaggtgtccaaggccgagatccaggccgagctgtgggatttcgtgctgaagatgcagaagtgcaacagcttcacacacgaggtggacaaggacgaggtgttcaacatcctgagagagctgtacgaggaactggtgcccagcagcgtggaaaagaagggcgaagccaaccagctgagcaacaagtttctgtaccctctggtggaccccaacagccagtctggaaagggaacagccagcagcggcagaaagcccagatggtacaacctgaagattgccggcgatccctcctgggaagaagagaagaagaagtgggaagaagataagaaaaaggacccgctggccaagatcctgggcaagctggctgagtacggactgatccctctgttcatcccctacaccgacagcaacgagcccatcgtgaaagaaatcaagtggatggaaaagtcccggaaccagagcgtgcggcggctggataaggacatgttcattcaggccctggaacggttcctgagctgggagagctggaacctgaaagtgaaagaggaatacgagaaggtcgagaaagagtacaagaccctggaagagaggatcaaagaggacatccaggctctgaaggctctggaacagtatgagaaagagcggcaagaacagctgctgcgggacaccctgaacaccaacgagtaccggctgagcaagagaggccttagaggctggcgggaaatcatccagaaatggctgaaaatggacgagaacgagccctccgagaagtacctggaagtgttcaaggactaccagcggaagcaccctagagaggccggcgattacagcgtgtacgagttcctgtccaagaaagagaaccacttcatctggcggaatcaccctgagtacccctacctgtacgccaccttctgcgagatcgacaagaaaaagaaggacgccaagcagcaggccaccttcacactggccgatcctatcaatcaccctctgtgggtccgattcgaggaaagaagcggcagcaacctgaacaagtacagaatcctgaccgagcagctgcacaccgagaagctgaagaaaaagctgacagtgcagctggaccggctgatctaccctacagaatctggcggctgggaagagaagggcaaagtggacattgtgctgctgcccagccggcagttctacaaccagatcttcctggacatcgaggaaaagggcaagcacgccttcacctacaaggatgagagcatcaagttccctctgaagggcacactcggcggagccagagtgcagttcgacagagatcacctgagaagataccctcacaaggtggaaagcggcaacgtgggcagaatctacttcaacatgaccgtgaacatcgagcctacagagtccccagtgtccaagtctctgaagatccaccgggacgacttccccaaggtggtcaacttcaagcccaaagaactgaccgagtggatcaaggacagcaagggcaagaaactgaagtccggcatcgagtccctggaaatcggcctgagagtgatgagcatcgacctgggacagagacaggccgctgccgcctctattttcgaggtggtggatcagaagcccgacatcgaaggcaagctgtttttcccaatcaagggcaccgagctgtatgccgtgcacagagccagcttcaacatcaagctgcccggcgagacactggtcaagagcagagaagtgctgcggaaggccagagaggacaatctgaaactgatgaaccagaagctcaacttcctgcggaacgtgctgcacttccagcagttcgaggacatcaccgagagagagaagcgggtcaccaagtggatcagcagacaagagaacagcgacgtgcccctggtgtaccaggatgagctgatccagatccgcgagctgatgtacaagccttacaaggactgggtcgccttcctgaagcagctccacaagagactggaagtcgagatcggcaaagaagtgaagcactggcggaagtccctgagcgacggaagaaagggcctgtacggcatctccctgaagaacatcgacgagatcgatcggacccggaagttcctgctgagatggtccctgaggcctaccgaacctggcgaagtgcgtagactggaacccggccagagattcgccatcgaccagctgaatcacctgaacgccctgaaagaagatcggctgaagaagatggccaacaccatcatcatgcacgccctgggctactgctacgacgtgcggaagaagaaatggcaggctaagaaccccgcctgccagatcatcctgttcgaggatctgagcaactacaacccctacgaggaaaggtcccgcttcgagaacagcaagctcatgaagtggtccagacgcgagatccccagacaggttgcactgcagggcgagatctatggcctgcaagtgggagaagtgggcgctcagttcagcagcagattccacgccaagacaggcagccctggcatcagatgtagcgtcgtgaccaaagagaagctgcaggacaatcggttcttcaagaatctgcagagagagggcagactgaccctggacaaaatcgccgtgctgaaagagggcgatctgtacccagacaaaggcggcgagaagttcatcagcctgagcaaggatcggaagtgcgtgaccacacacgccgacatcaacgccgctcagaacctgcagaagcggttctggacaagaacccacggcttctacaaggtgtactgcaaggcctaccaggtggacggccagaccgtgtacatccctgagagcaaggaccagaagcagaagatcatcgaagagttcggcgagggctacttcattctgaaggacggggtgtacgaatgggtcaacgccggcaagggaggctctggaggaagctccgaagtcgagttttcccatgagtactggatgagacacgcattgactctcgcaaagagggctcgagatgaacgcgaggtgcccgtgggggcagtactcgtgctcaacaatcgcgtaatcggcgaaggttggaatagggcaatcggactccacgaccccactgcacatgcggaaatcatggcccttcgacagggagggcttgtgatgcagaattatcgactttatgatgcgacgctgtacgtcacgtttgaaccttgcgtaatgtgcgcgggagctatgattcactcccgcattggacgagttgtattcggtgttcgcaacgccaagacgggtgccgcaggttcactgatggacgtgctgcatcatccaggcatgaaccaccgggtagaaatcacagaaggcatattggcggacgaatgtgcggcgctgttgtgtcgtttttttcgcatgcccaggcgggtctttaacgcccagaaaaaagcacaatcctctactgacggctcttctggatctgaaacacctggcacaagcgagagcgccacccctgagagctctggcctgaaaatcaagaagggcagctccaagcagagcagcagcgagctggtggatagcgacatcctgaaagacagcttcgacctggcctccgagctgaaaggcgaaaagctgatgctgtacagggaccccagcggcaatgtgttccccagcgacaaatggatggccgctggcgtgttcttcggaaagctggaacgcatcctgatcagcaagctgaccaaccagtactccatcagcaccatcgaggacgacagcagcaagcagtctatgaaaaggccggcggccacgaaaaaggccggccaggcaaaaaagaaaaagggatcctacccatacgatgttccagattacgcttatccctacgacgtgcctgattatgcatacccatatgatgtccccgactatgcctaa

SEQ ID NO: 12 - protein, 1361 aa, Artificial Sequence
  Description of artificial sequence: BhCas12b GGSGGS-ABE8-Xten20 at K1019 polypeptide sequence
MAPKKKRKVGIHGVPAAATRSFILKIEPNEEVKKGLWKTHEVLNHGIAYYMNILKLIRQEAIYEHHEQDPKNPKKVSKAEIQAELWDFVLKMQKCNSFTHEVDKDEVFNILRELYEELVPSSVEKKGEANQLSNKFLYPLVDPNSQSGKGTASSGRKPRWYNLKIAGDPSWEEEKKKWEEDKKKDPLAKILGKLAEYGLIPLFIPYTDSNEPIVKEIKWMEKSRNQSVRRLDKDMFIQALERFLSWESWNLKVKEEYEKVEKEYKTLEERIKEDIQALKALEQYEKERQEQLLRDTLNTNEYRLSKRGLRGWREIIQKWLKMDENEPSEKYLEVFKDYQRKHPREAGDYSVYEFLSKKENHFIWRNHPEYPYLYATFCEIDKKKKDAKQQATFTLADPINHPLWVRFEERSGSNLNKYRILTEQLHTEKLKKKLTVQLDRLIYPTESGGWEEKGKVDIVLLPSRQFYNQIFLDIEEKGKHAFTYKDESIKFPLKGTLGGARVQFDRDHLRRYPHKVESGNVGRIYFNMTVNIEPTESPVSKSLKIHRDDFPKVVNFKPKELTEWIKDSKGKKLKSGIESLEIGLRVMSIDLGQRQAAAASIFEVVDQKPDIEGKLFFPIKGTELYAVHRASFNIKLPGETLVKSREVLRKAREDNLKLMNQKLNFLRNVLHFQQFEDITEREKRVTKWISRQENSDVPLVYQDELIQIRELMYKPYKDWVAFLKQLHKRLEVEIGKEVKHWRKSLSDGRKGLYGISLKNIDEIDRTRKFLLRWSLRPTEPGEVRRLEPGQRFAIDQLNHLNALKEDRLKKMANTIIMHALGYCYDVRKKKWQAKNPACQIILFEDLSNYNPYEERSRFENSKLMKWSRREIPRQVALQGEIYGLQVGEVGAQFSSRFHAKTGSPGIRCSVVTKEKLQDNRFFKNLQREGRLTLDKIAVLKEGDLYPDKGGEKFISLSKDRKCVTTHADINAAQNLQKRFWTRTHGFYKVYCKAYQVDGQTVYIPESKDQKQKIIEEFGEGYFILKDGVYEWVNAGKGGSGGSSEVEFSHEYWMRHALTLAKRARDEREVPVGAVLVLNNRVIGEGWNRAIGLHDPTAHAEIMALRQGGLVMQNYRLYDATLYVTFEPCVMCAGAMIHSRIGRVVFGVRNAKTGAAGSLMDVLHHPGMNHRVEITEGILADECAALLCRFFRMPRRVFNAQKKAQSSTDGSSGSETPGTSESATPESSGLKIKKGSSKQSSSELVDSDILKDSFDLASELKGEKLMLYRDPSGNVFPSDKWMAAGVFFGKLERILISKLTNQYSISTIEDDSSKQSMKRPAATKKAGQAKKKKGSYPYDVPDYAYPYDVPDYAYPYDVPDYA

SEQ ID NO: 13 - protein, 208 aa, Petromyzon marinus
  MISC_FEATURE (1)..(208): tr|A5H718|A5H718_PETMA Cytosine deaminase OS=Petromyzon marinus OX=7757 PE=2 SV=1 amino acid sequence; PmCDA1 polypeptide sequence
MTDAEYVRIHEKLDIYTFKKQFFNNKKSVSHRCYVLFELKRRGERRACFWGYAVNKPQSGTERGIHAEIFSIRKVEEYLRDNPGQFTINWYSSWSPCADCAEKILEWYNQELRGNGHTLKIWACKLYYEKNARNQIGLWNLRDNGVGLNVMVSEHYQCCRKIFIQSSHNQLNENRWLEKTLKRAEKRRSELSIMIQVKILHTTKSPAV

SEQ ID NO: 14 - DNA, 766 bp, Petromyzon marinus
  misc_feature (1)..(766): EF094822.1 Petromyzon marinus isolate PmCDA.21 cytosine deaminase mRNA, complete cds; PmCDA1 polynucleotide sequence
tgacacgacacagccgtgtatatgaggaagggtagctggatggggggggggggaatacgttcagagaggacattagcgagcgtcttgttggtggccttgagtctagacacctgcagacatgaccgacgctgagtacgtgagaatccatgagaagttggacatctacacgtttaagaaacagtttttcaacaacaaaaaatccgtgtcgcatagatgctacgttctctttgaattaaaacgacggggtgaacgtagagcgtgtttttggggctatgctgtgaataaaccacagagcgggacagaacgtggaattcacgccgaaatctttagcattagaaaagtcgaagaatacctgcgcgacaaccccggacaattcacgataaattggtactcatcctggagtccttgtgcagattgcgctgaaaagatcttagaatggtataaccaggagctgcgggggaacggccacactttgaaaatctgggcttgcaaactctattacgagaaaaatgcgaggaatcaaattgggctgtggaacctcagagataacggggttgggttgaatgtaatggtaagtgaacactaccaatgttgcaggaaaatattcatccaatcgtcgcacaatcaattgaatgagaatagatggcttgagaagactttgaagcgagctgaaaaacgacggagcgagttgtccattatgattcaggtaaaaatactccacaccactaagagtcctgctgtttaagaggctatgcggatggttttc

SEQ ID NO: 15 - protein, 145 aa, Homo sapiens
  MISC_FEATURE (1)..(145): tr|Q6QJ80|Q6QJ80_HUMAN Activation-induced cytidine deaminase OS=Homo sapiens OX=9606 GN=AICDA PE=2 SV=1; AID polypeptide sequence
MDSLLMNRRKFLYQFKNVRWAKGRRETYLCYVVKRRDSATSFSLDFGYLRNKNGCHVELLFLRYISDWDLDPGRCYRVTWFTSWSPCYDCARHVADFLRGNPNLSLRIFTARLYFCEDRKAEPEGLRRLHRAGVQIAIMTFKAPV

SEQ ID NO: 16 - DNA, 10681 bp, Homo sapiens
  misc_feature (1)..(10681): NG_011588.1:5001-15681 Homo sapiens activation induced cytidine deaminase (AICDA), RefSeqGene (LRG_17) on chromosome 12; nucleic acid sequence of the CDS of human AID; polynucleotide sequence
agagaaccatcattaattgaagtgagatttttctggcctgagacttgcagggaggcaagaagacactctggacaccactatggacaggtaaagaggcagtcttctcgtgggtgattgcactggccttcctctcagagcaaatctgagtaatgagactggtagctatccctttctctcatgtaactgtctgactgataagatcagcttgatcaatatgcatatatattttttgatctgtctccttttcttctattcagatcttatacgctgtcagcccaattctttctgtttcagacttctcttgatttccctctttttcatgtggcaaaagaagtagtgcgtacaatgtactgattcgtcctgagatttgtaccatggttgaaactaatttatggtaataatattaacatagcaaatctttagagactcaaatcatgaaaaggtaatagcagtactgtactaaaaacggtagtgctaattttcgtaataattttgtaaatattcaacagtaaaacaacttgaagacacactttcctagggaggcgttactgaaataatttagctatagtaagaaaatttgtaattttagaaatgccaagcattctaaattaattgcttgaaagtcactatgattgtgtccattataaggagacaaattcattcaagcaagttatttaatgttaaaggcccaattgttaggcagttaatggcacttttactattaactaatctttccatttgttcagacgtagcttaacttacctcttaggtgtgaatttggttaaggtcctcataatgtctttatgtgcagtttttgataggttattgtcatagaacttattctattcctacatttatgattactatggatgtatgagaataacacctaatccttatactttacctcaatttaactcctttataaagaacttacattacagaataaagattttttaaaaatatatttttttgtagagacagggtcttagcccagccgaggctggtctctaagtcctggcccaagcgatcctcctgcctgggcctcctaaagtgctggaattatagacatgagccatcacatccaatatacagaataaagatttttaatggaggatttaatgttcttcagaaaattttcttgaggtcagacaatgtcaaatgtctcctcagtttacactgagattttgaaaacaagtctgagctataggtccttgtgaagggtccattggaaatacttgttcaaagtaaaatggaaagcaaaggtaaaatcagcagttgaaattcagagaaagacagaaaaggagaaaagatgaaattcaacaggacagaagggaaatatattatcattaaggaggacagtatctgtagagctcattagtgatggcaaaatgacttggtcaggattatttttaacccgcttgtttctggtttgcacggctggggatgcagctagggttctgcctcagggagcacagctgtccagagcagctgtcagcctgcaagcctgaaacactccctcggtaaagtccttcctactcaggacagaaatgacgagaacagggagctggaaacaggcccctaaccagagaagggaagtaatggatcaacaaagttaactagcaggtcaggatcacgcaattcatttcactctgactggtaacatgtgacagaaacagtgtaggcttattgtattttcatgtagagtaggacccaaaaatccacccaaagtcctttatctatgccacatccttcttatctatacttccaggacactttttcttccttatgataaggctctctctctctccacacacacacacacacacacacacacacacacacacacacacacaaacacacaccccgccaaccaaggtgcatgtaaaaagatgtagattcctctgcctttctcatctacacagcccaggagggtaagttaatataagagggatttattggtaagagatgatgcttaatctgtttaacactgggcctcaaagagagaatttcttttcttctgtacttattaagcacctattatgtgttgagcttatatatacaaagggttattatatgctaatatagtaatagtaatggtggttggtactatggtaattaccataaaaattattatccttttaaaataaagctaattattattggatcttttttagtattcattttatgttttttatgtttttgattttttaaaagacaatctcaccctgttacccaggctggagtgcagtggtgcaatcatagctttctgcagtcttgaactcctgggctcaagcaatcctcctgccttggcctcccaaagtgttgggatacagtcatgagccactgcatctggcctaggatccatttagattaaaatatgcattttaaattttaaaataatatggctaatttttaccttatgtaatgtgtatactggcaataaatctagtttgctgcctaaagtttaaagtgctttccagtaagcttcatgtacgtgaggggagacatttaaagtgaaacagacagccaggtgtggtggctcacgcctgtaatcccagcactctgggaggctgaggtgggtggatcgcttgagccctggagttcaagaccagcctgagcaacatggcaaaacgctgtttctataacaaaaattagccgggcatggtggcatgtgcctgtggtcccagctactagggggctgaggcaggagaatcgttggagcccaggaggtcaaggctgcactgagcagtgcttgcgccactgcactccagcctgggtgacaggaccagaccttgcctcaaaaaaataagaagaaaaattaaaaataaatggaaacaactacaaagagctgttgtcctagatgagctacttagttaggctgatattttggtatttaacttttaaagtcagggtctgtcacctgcactacattattaaaatatcaattctcaatgtatatccacacaaagactggtacgtgaatgttcatagtacctttattcacaaaaccccaaagtagagactatccaaatatccatcaacaagtgaacaaataaacaaaatgtgctatatccatgcaatggaataccaccctgcagtacaaagaagctacttggggatgaatcccaaagtcatgacgctaaatgaaagagtcagacatgaaggaggagataatgtatgccatacgaaattctagaaaatgaaagtaacttatagttacagaaagcaaatcagggcaggcatagaggctcacacctgtaatcccagcactttgagaggccacgtgggaagattgctagaactcaggagttcaagaccagcctgggcaacacagtgaaactccattctccacaaaaatgggaaaaaaagaaagcaaatcagtggttgtcctgtggggaggggaaggactgcaaagagggaagaagctctggtggggtgagggtggtgattcaggttctgtatcctgactgtggtagcagtttggggtgtttacatccaaaaatattcgtagaattatgcatcttaaatgggtggagtttactgtatgtaaattatacctcaatgtaagaaaaaataatgtgtaagaaaactttcaattctcttgccagcaaacgttattcaaattcctgagccctttacttcgcaaattctctgcacttctgccccgtaccattaggtgacagcactagctccacaaattggataaatgcatttctggaaaagactagggacaaaatccaggcatcacttgtgctttcatatcaaccatgctgtacagcttgtgttgctgtctgcagctgcaatggggactcttgatttctttaaggaaacttgggttaccagagtatttccacaaatgctattcaaattagtgcttatgatatgcaagacactgtgctaggagccagaaaacaaagaggaggagaaatcagtcattatgtgggaacaacatagcaagatatttagatcattttgactagttaaaaaagcagcagagtacaaaatcacacatgcaatcagtataatccaaatcatgtaaatatgtgcctgtagaaagactagaggaataaacacaagaatcttaacagtcattgtcattagacactaagtctaattattattattagacactatgatatttgagatttaaaaaatctttaatattttaaaatttagagctcttctatttttccatagtattcaagtttgacaatgatcaagtattactctttctttttttttttttttttttttttttgagatggagttttggtcttgttgcccatgctggagtggaatggcatgaccatagctcactgcaacctccacctcctgggttcaagcaaagctgtcgcctcagcctcccgggtagatgggattacaggcgcccaccaccacactcggctaatgtttgtatttttagtagagatggggtttcaccatgttggccaggctggtctcaaactcctgacctcagaggatccacctgcctcagcctcccaaagtgctgggattacagatgtaggccactgcgcccggccaagtattgctcttatacattaaaaaacaggtgtgagccactgcgcccagccaggtattgctcttatacattaaaaaataggccggtgcagtggctcacgcctgtaatcccagcactttgggaagccaaggcgggcagaacacccgaggtcaggagtccaaggccagcctggccaagatggtgaaaccccgtctctattaaaaatacaaacattacctgggcatgatggtgggcgcctgtaatcccagctactcaggaggctgaggcaggaggatccgcggagcctggcagatctgcctgagcctgggaggttgaggctacagtaagccaagatcatgccagtatacttcagcctgggcgacaaagtgagaccgtaacaaaaaaaaaaaaatttaaaaaaagaaatttagatcaagatccaactgtaaaaagtggcctaaacaccacattaaagagtttggagtttattctgcaggcagaagagaaccatcagggggtcttcagcatgggaatggcatggtgcacctggtttttgtgagatcatggtggtgacagtgtggggaatgttattttggagggactggaggcagacagaccggttaaaaggccagcacaacagataaggaggaagaagatgagggcttggaccgaagcagagaagagcaaacagggaaggtacaaattcaagaaatattggggggtttgaatcaacacatttagatgattaattaaatatgaggactgaggaataagaaatgagtcaaggatggttccaggctgctaggctgcttacctgaggtggcaaagtcgggaggagtggcagtttaggacagggggcagttgaggaatattgttttgatcattttgagtttgaggtacaagttggacacttaggtaaagactggaggggaaatctgaatatacaattatgggactgaggaacaagtttattttattttttgtttcgttttcttgttgaagaacaaatttaattgtaatcccaagtcatcagcatctagaagacagtggcaggaggtgactgtcttgtgggtaagggtttggggtccttgatgagtatctctcaattggccttaaatataagcaggaaaaggagtttatgatggattccaggctcagcagggctcaggagggctcaggcagccagcagaggaagtcagagcatcttctttggtttagcccaagtaatgacttccttaaaaagctgaaggaaaatccagagtgaccagattataaactgtactcttgcattttctctccctcctctcacccacagcctcttgatgaaccggaggaagtttctttaccaattcaaaaatgtccgctgggctaagggtcggcgtgagacctacctgtgctacgtagtgaagaggcgtgacagtgctacatccttttcactggactttggttatcttcgcaataaggtatcaattaaagtcggctttgcaagcagtttaatggtcaactgtgagtgcttttagagccacctgctgatggtattacttccatccttttttggcatttgtgtctctatcacattcctcaaatccttttttttatttctttttccatgtccatgcacccatattagacatggcccaaaatatgtgatttaattcctccccagtaatgctgggcaccctaataccactccttccttcagtgccaagaacaactgctcccaaactgtttaccagctttcctcagcatctgaattgcctttgagattaattaagctaaaagcatttttatatgggagaatattatcagcttgtccaagcaaaaattttaaatgtgaaaaacaaattgtgtcttaagcatttttgaaaattaaggaagaagaatttgggaaaaaattaacggtggctcaattctgtcttccaaatgatttcttttccctcctactcacatgggtcgtaggccagtgaatacattcaacatggtgatccccagaaaactcagagaagcctcggctgatgattaattaaattgatctttcggctacccgagagaattacatttccaagagacttcttcaccaaaatccagatgggtttacataaacttctgcccacgggtatctcctctctcctaacacgctgtgacgtctgggcttggtggaatctcagggaagcatccgtggggtggaaggtcatcgtctggctcgttgtttgatggttatattaccatgcaattttctttgcctacatttgtattgaatacatcccaatctccttcctattcggtgacatgacacattctatttcagaaggctttgattttatcaagcactttcatttacttctcatggcagtgcctattacttctcttacaatacccatctgtctgctttaccaaaatctatttccccttttcagatcctcccaaatggtcctcataaactgtcctgcctccacctagtggtccaggtatatttccacaatgttacatcaacaggcacttctagccattttccttctcaaaaggtgcaaaaagcaacttcataaacacaaattaaatcttcggtgaggtagtgtgatgctgcttcctcccaactcagcgcacttcgtcttcctcattccacaaaaacccatagccttccttcactctgcaggactagtgctgccaagggttcagctctacctactggtgtgctcttttgagcaagttgcttagcctctctgtaacacaaggacaatagctgcaagcatccccaaagatcattgcaggagacaatgactaaggctaccagagccgcaataaaagtcagtgaattttagcgtggtcctctctgtctctccagaacggctgccacgtggaattgctcttcctccgctacatctcggactgggacctagaccctggccgctgctaccgcgtcacctggttcacctcctggagcccctgctacgactgtgcccgacatgtggccgactttctgcgagggaaccccaacctcagtctgaggatcttcaccgcgcgcctctacttctgtgaggaccgcaaggctgagcccgaggggctgcggcggctgcaccgcgccggggtgcaaatagccatcatgaccttcaaaggtgcgaaagggccttccgcgcaggcgcagtgcagcagcccgcattcgggattgcgatgcggaatgaatgagttagtggggaagctcgaggggaagaagtgggcggggattctggttcacctctggagccgaaattaaagattagaagcagagaaaagagtgaatggctcagagacaaggccccgaggaaatgagaaaatggggccagggttgcttctttcccctcgatttggaacctgaactgtcttctacccccatatccccgcctttttttcctttttttttttttgaagattatttttactgctggaatacttttgtagaaaaccacgaaagaactttcaaagcctgggaagggctgcatgaaaattcagttcgtctctccagacagcttcggcgcatccttttggtaaggggcttcctcgctttttaaattttctttctttctctacagtcttttttggagtttcgtatatttcttatattttcttattgttcaatcactctcagttttcatctgatgaaaactttatttctcctccacatcagctttttcttctgctgtttcaccattcagagccctctgctaaggttccttttccctcccttttctttcttttgttgtttcacatctttaaatttctgtctctccccagggttgcgtttccttcctggtcagaattcttttctcctttttttttttttttttttttttttttaaacaaacaaacaaaaaacccaaaaaaactctttcccaatttactttcttccaacatgttacaaagccatccactcagtttagaagactctccggccccaccgacccccaacctcgttttgaagccattcactcaatttgcttctctctttctctacagcccctgtatgaggttgatgacttacgagacgcatttcgtactttgggactttgatagcaacttccaggaatgtcacacacgatgaaatatctctgctgaagacagtggataaaaaacagtccttcaagtcttctctgtttttattcttcaactctcactttcttagagtttacagaaaaaatatttatatacgactctttaaaaagatctatgtcttgaaaatagagaaggaacacaggtctggccagggacgtgctgcaattggtgcagttttgaatgcaacattgtcccctactgggaataacagaactgcaggacctgggagcatcctaaagtgtcaacgtttttctatgacttttaggtaggatgagagcagaaggtagatcctaaaaagcatggtgagaggatcaaatgtttttatatcaacatcctttattatttgattcatttgagttaacagtggtgttagtgatagatttttctattcttttcccttgacgtttactttcaagtaacacaaactcttccatcaggccatgatctataggacctcctaatgagagtatctgggtgattgtgaccccaaaccatctctccaaagcattaatatccaatcatgcgctgtatgttttaatcagcagaagcatgtttttatgtttgtacaaaagaagattgttatgggtggggatggaggtatagaccatgcatggtcaccttcaagctactttaataaaggatcttaaaatgggcaggaggactgtgaacaagacaccctaataatgggttgatgtctgaagtagcaaatcttctggaaacgcaaactcttttaaggaagtccctaatttagaaacacccacaaacttcacatatcataattagcaaacaattggaaggaagttgcttgaatgttggggagaggaaaatctattggctctcgtgggtctcttcatctcagaaatgccaatcaggtcaaggtttgctacattttgtatgtgtgtgatgcttctcccaaaggtatattaactatataagagagttgtgacaaaacagaatgataaagctgcgaaccgtggcacacgctcatagttctagctgcttgggaggttgaggagggaggatggcttgaacacaggtgttcaaggccagcctgggcaacataacaagatcctgtctctcaaaaaaaaaaaaaaaaaaaagaaagagagagggccgggcgtggtggctcacgcctgtaatcccagcactttgggaggccgagccgggcggatcacctgtggtcaggagtttgagaccagcctggccaacatggcaaaaccccgtctgtactcaaaatgcaaaaattagccaggcgtggtagcaggcacctgtaatcccagctacttgggaggctgaggcaggagaatcgcttgaacccaggaggtggaggttgcagtaagctgagatcgtgccgttgcactccagcctgggcgacaagagcaagactctgtctcagaaaaaaaaaaaaaaaagagagagagagagaaagagaacaatatttgggagagaaggatggggaagcattgcaaggaaattgtgctttatccaacaaaatgtaaggagccaataagggatccctatttgtctcttttggtgtctatttgtccctaacaactgtctttgacagtgagaaaaatattcagaataaccatatccctgtgccgttattacctagcaacccttgcaatgaagatgagcagatccacaggaaaacttgaatgcacaactgtcttattttaatcttattgtacataagtttgtaaaagagttaaaaattgttacttcatgtattcatttatattttatattattttgcgtctaatgattttttattaacatgatttccttttctgatatattgaaatggagtctcaaagcttcataaatttataactttagaaatgattctaataacaacgtatgtaattgtaacattgcagtaatggtgctacgaagccatttctcttgatttttagtaaacttttatgacagcaaatttgcttctggctcactttcaatcagttaaataaatgataaataattttggaagctgtgaagataaaataccaaataaaataatataaaagtgatttatatgaagttaaaataaaaaatcagtatgatggaataaacttg

SEQ ID NO: 17 - protein, 198 aa, Homo sapiens [sequence omitted]

SEQ ID NO: 18 - protein, 198 aa, Canis lupus familiaris
  MISC_FEATURE (1)..(198): Canine AID (clAID) polypeptide sequence
  MISC_FEATURE (1)..(30): Nuclear localization sequence
  MISC_FEATURE (183)..(198): Nuclear export signal
MDSLLMKQRKFLYHFKNVRWAKGRHETYLCYVVKRRDSATSFSLDFGHLRNKSGCHVELLFLRYISDWDLDPGRCYRVTWFTSWSPCYDCARHVADFLRGYPNLSLRIFAARLYFCEDRKAEPEGLRRLHRAGVQIAIMTFKDYFYCWNTFVENREKTFKAWEGLHENSVRLSRQLRRILLPLYEVDDLRDAFRTLGL

SEQ ID NO: 19 - protein, 199 aa, Bos Taurus
  MISC_FEATURE (1)..(199): Bovine AID (btAID) polypeptide sequence
  MISC_FEATURE (1)..(30): Nuclear localization sequence
  MISC_FEATURE (183)..(199): Nuclear export signal
MDSLLKKQRQFLYQFKNVRWAKGRHETYLCYVVKRRDSPTSFSLDFGHLRNKAGCHVELLFLRYISDWDLDPGRCYRVTWFTSWSPCYDCARHVADFLRGYPNLSLRIFTARLYFCDKERKAEPEGLRRLHRAGVQIAIMTFKDYFYCWNTFVENHERTFKAWEGLHENSVRLSRQLRRILLPLYEVDDLRDAFRTLGL

SEQ ID NO: 20 - protein, 239 aa, Rattus
  MISC_FEATURE (1)..(239): Rat AID polypeptide sequence
  MISC_FEATURE (1)..(26): Nuclear localization sequence
  MISC_FEATURE (194)..(239): Nuclear export signal
MAVGSKPKAALVGPHWERERIWCFLCSTGLGTQQTGQTSRWLRPAATQDPVSPPRSLLMKQRKFLYHFKNVRWAKGRHETYLCYVVKRRDSATSFSLDFGYLRNKSGCHVELLFLRYISDWDLDPGRCYRVTWFTSWSPCYDCARHVADFLRGNPNLSLRIFTARLTGWGALPAGLMSPARPSDYFYCWNTFVENHERTFKAWEGLHENSVRLSRRLRRILLPLYEVDDLRDAFRTLGL

SEQ ID NO: 21 - protein, 198 aa, Mus musculus [sequence omitted]

SEQ ID NO: 22 - protein, 229 aa, Rattus norvegicus [sequence omitted]

SEQ ID NO: 23 - protein, 229 aa, Mesocricetus auratus
  MISC_FEATURE (1)..(229): maAPOBEC-1 polypeptide sequence
MSSETGPVVVDPTLRRRIEPHEFDAFFDQGELRKETCLLYEIRWGGRHNIWRHTGQNTSRHVEINFIEKFTSERYFYPSTRCSIVWFLSWSPCGECSKAITEFLSGHPNVTLFIYAARLYHHTDQRNRQGLRDLISRGVTIRIMTEQEYCYCWRNFVNYPPSNEVYWPRYPNLWMRLYALELYCIHLGLPPCLKIKRRHQYPLTFFRLNLQSCHYQRIPPHILWATGFI

SEQ ID NO: 24 - protein, 236 aa, Pongo pygmaeus
  MISC_FEATURE (1)..(236): ppAPOBEC-1 polypeptide sequence
MTSEKGPSTGDPTLRRRIESWEFDVFYDPRELRKETCLLYEIKWGMSRKIWRSSGKNTTNHVEVNFIKKFTSERRFHSSISCSITWFLSWSPCWECSQAIREFLSQHPGVTLVIYVARLFWHMDQRNRQGLRDLVNSGVTIQIMRASEYYHCWRNFVNYPPGDEAHWPQYPPLWMMLYALELHCIILSLPPCLKISRRWQNHLAFFRLHLQNCHYQTIPPHILLATGLIHPSVTWR

SEQ ID NO: 25 - protein, 236 aa, Oryctolagus cuniculus
  MISC_FEATURE (1)..(236): ocAPOBEC1 polypeptide sequence
MASEKGPSNKDYTLRRRIEPWEFEVFFDPQELRKEACLLYEIKWGASSKTWRSSGKNTTNHVEVNFLEKLTSEGRLGPSTCCSITWFLSWSPCWECSMAIREFLSQHPGVTLIIFVARLFQHMDRRNRQGLKDLVTSGVTVRVMSVSEYCYCWENFVNYPPGKAAQWPRYPPRWMLMYALELYCIILGLPPCLKISRRHQKQLTFFSLTPQYCHYKMIPPYILLATGLLQPSVPWR

SEQ ID NO: 26 - protein, 235 aa, Monodelphis domestica
  MISC_FEATURE (1)..(235): mdAPOBEC-1 polypeptide sequence
MNSKTGPSVGDATLRRRIKPWEFVAFFNPQELRKETCLLYEIKWGNQNIWRHSNQNTSQHAEINFMEKFTAERHFNSSVRCSITWFLSWSPCWECSKAIRKFLDHYPNVTLAIFISRLYWHMDQQHRQGLKELVHSGVTIQIMSYSEYHYCWRNFVDYPQGEEDYWPKYPYLWIMLYVLELHCIILGLPPCLKISGSHSNQLALFSLDLQDCHYQKIPYNVLVATGLVQPFVTWR

SEQ ID NO: 27 - protein, 224 aa, Pongo pygmaeus
  MISC_FEATURE (1)..(224): ppAPOBEC-2 polypeptide sequence
MAQKEEAAAATEAASQNGEDLENLDDPEKLKELIELPPFEIVTGERLPANFFKFQFRNVEYSSGRNKTFLCYVVEAQGKGGQVQASRGYLEDEHAAAHAEEAFFNTILPAFDPALRYNVTWYVSSSPCAACADRIIKTLSKTKNLRLLILVGRLFMWEELEIQDALKKLKEAGCKLRIMKPQDFEYVWQNFVEQEEGESKAFQPWEDIQENFLYYEEKLADILK

SEQ ID NO: 28 - protein, 224 aa, Bos Taurus
  MISC_FEATURE (1)..(224): btAPOBEC-2 polypeptide sequence
MAQKEEAAAAAEPASQNGEEVENLEDPEKLKELIELPPFEIVTGERLPAHYFKFQFRNVEYSSGRNKTFLCYVVEAQSKGGQVQASRGYLEDEHATNHAEEAFFNSIMPTFDPALRYMVTWYVSSSPCAACADRIVKTLNKTKNLRLLILVGRLFMWEEPEIQAALRKLKEAGCRLRIMKPQDFEYIWQNFVEQEEGESKAFEPWEDIQENFLYYEEKLADILK

SEQ ID NO: 29 - protein, 440 aa, Mus musculus
  MISC_FEATURE (1)..(440): mAPOBEC-3-(1) polypeptide sequence
MQPQRLGPRAGMGPFCLGCSHRKCYSPIRNLISQETFKFHFKNLGYAKGRKDTFLCYEVTRKDCDSPVSLHHGVFKNKDNIHAEICFLYWFHDKVLKVLSPREEFKITWYMSWSPCFECAEQIVRFLATHHNLSLDIFSSRLYNVQDPETQQNLCRLVQEGAQVAAMDLYEFKKCWKKFVDNGGRRFRPWKRLLTNFRYQDSKLQEILRPCYISVPSSSSSTLSNICLTKGLPETRFWVEGRRMDPLSEEEFYSQFYNQRVKHLCYYHRMKPYLCYQLEQFNGQAPLKGCLLSEKGKQHAEILFLDKIRSMELSQVTITCYLTWSPCPNCAWQLAAFKRDRPDLILHIYTSRLYFHWKRPFQKGLCSLWQSGILVDVMDLPQFTDCWTNFVNPKRPFWPWKGLEIISRRTQRRLRRIKESWGLQDLVNDFGNLQLGPPMS

SEQ ID NO: 30 - protein, 429 aa, Mus musculus
  MISC_FEATURE (1)..(429): APOBEC-3-(2) (Mouse APOBEC-3) polypeptide sequence
  MISC_FEATURE (71)..(108): Nucleic acid editing domain
  MISC_FEATURE (288)..(319): Nucleic acid editing domain
MGPFCLGCSHRKCYSPIRNLISQETFKFHFKNLGYAKGRKDTFLCYEVTRKDCDSPVSLHHGVFKNKDNIHAEICFLYWFHDKVLKVLSPREEFKITWYMSWSPCFECAEQIVRFLATHHNLSLDIFSSRLYNVQDPETQQNLCRLVQEGAQVAAMDLYEFKKCWKKFVDNGGRRFRPWKRLLTNFRYQDSKLQEILRPCYIPVPSSSSSTLSNICLTKGLPETRFCVEGRRMDPLSEEEFYSQFYNQRVKHLCYYHRMKPYLCYQLEQFNGQAPLKGCLLSEKGKQHAEILFLDKIRSMELSQVTITCYLTWSPCPNCAWQLAAFKRDRPDLILHIYTSRLYFHWKRPFQKGLCSLWQSGILVDVMDLPQFTDCWTNFVNPKRPFWPWKGLEIISRRTQRRLRRIKESWGLQDLVNDFGNLQLGPPMS

SEQ ID NO: 31 - protein, 430 aa, Rattus
  MISC_FEATURE (1)..(430): APOBEC-3 polypeptide sequence
  MISC_FEATURE (72)..(109): Nucleic acid editing domain
  MISC_FEATURE (289)..(320): Nucleic acid editing domain
MGPFCLGCSHRKCYSPIRNLISQETFKFHFKNRLRYAIDRKDTFLCYEVTRKDCDSPVSLHHGVFKNKDNIHAEICFLYWFHDKVLKVLSPREEFKITWYMSWSPCFECAEQVLRFLATHHNLSLDIFSSRLYNIRDPENQQNLCRLVQEGAQVAAMDLYEFKKCWKKFVDNGGRRFRPWKKLLTNFRYQDSKLQEILRPCYIPVPSSSSSTLSNICLTKGLPETRFCVERRRVHLLSEEEFYSQFYNQRVKHLCYYHGVKPYLCYQLEQFNGQAPLKGCLLSEKGKQHAEILFLDKIRSMELSQVIITCYLTWSPCPNCAWQLAAFKRDRPDLILHIYTSRLYFHWKRPFQKGLCSLWQSGILVDVMDLPQFTDCWTNFVNPKRPFWPWKGLEIISRRTQRRLHRIKESWGLQDLVNDFGNLQLGPPMS

SEQ ID NO: 32 - protein, 199 aa, Homo sapiens
  MISC_FEATURE (1)..(199): hAPOBEC-3A polypeptide sequence
  MISC_FEATURE (70)..(106): Nucleic acid editing domain
MEASPASGPRHLMDPHIFTSNFNNGIGRHKTYLCYEVERLDNGTSVKMDQHRGFLHNQAKNLLCGFYGRHAELRFLDLVPSLQLDPAQIYRVTWFISWSPCFSWGCAGEVRAFLQENTHVRLRIFAARIYDYDPLYKEALQMLRDAGAQVSIMTYDEFKHCWDTFVDHQGCPFQPWDGLDEHSQALSGRLRAILQNQGN

SEQ ID NO: 33 - protein, 373 aa, Homo sapiens
  MISC_FEATURE (1)..(373): hAPOBEC-3F polypeptide sequence
  MISC_FEATURE (65)..(99): Nucleic acid editing domain
  MISC_FEATURE (248)..(283): Nucleic acid editing domain
MKPHFRNTVERMYRDTFSYNFYNRPILSRRNTVWLCYEVKTKGPSRPRLDAKIFRGQVYSQPEHHAEMCFLSWFCGNQLPAYKCFQITWFVSWTPCPDCVAKLAEFLAEHPNVTLTISAARLYYYWERDYRRALCRLSQAGARVKIMDDEEFAYCWENFVYSEGQPFMPWYKFDDNYAFLHRTLKEILRNPMEAMYPHIFYFHFKNLRKAYGRNESWLCFTMEVVKHHSPVSWKRGVFRNQVDPETHCHAERCFLSWFCDDILSPNTNYEVTWYTSWSPCPECAGEVAEFLARHSNVNLTIFTARLYYFWDTDYQEGLRSLSQEGASVEIMGYKDFKYCWENFVYNDDEPFKPWKGLKYNFLFLDSKLQEILE

SEQ ID NO: 34 - protein, 370 aa, Rhesus macaque
  MISC_FEATURE (1)..(370): Rhesus macaque APOBEC-3G polypeptide sequence
  MISC_FEATURE (1)..(61): Cytoplasmic localization signal
MVEPMDPRTFVSNFNNRPILSGLNTVWLCCEVKTKDPSGPPLDAKIFQGKVYSKAKYHPEMRFLRWFHKWRQLHHDQEYKVTWYVSWSPCTRCANSVATFLAKDPKVTLTIFVARLYYFWKPDYQQALRILCQKRGGPHATMKIMNYNEFQDCWNKFVDGRGKPFKPRNNLPKHYTLLQATLGELLRHLMDPGTFTSNFNNKPWVSGQHETYLCYKVERLHNDTWVPLNQHRGFLRNQAPNIHGFPKGRHAELCFLDLIPFWKLDGQQYRVTCFTSWSPCFSCAQEMAKFISNNEHVSLCIFAARIYDDQGRYQEGLRALHRDGAKIAMMNYSEFEYCWDTFVDRQGRPFQPWDGLDEHSQALSGRLRAI

SEQ ID NO: 35 - protein, 384 aa, Pan troglodytes
  MISC_FEATURE (1)..(384): Chimpanzee APOBEC-3G polypeptide sequence
  MISC_FEATURE (1)..(60): Cytoplasmic localization signal
  MISC_FEATURE (65)..(100): Nucleic acid editing domain
  MISC_FEATURE (257)..(291): Nucleic acid editing domain
MKPHFRNPVERMYQDTFSDNFYNRPILSHRNTVWLCYEVKTKGPSRPPLDAKIFRGQVYSKLKYHPEMRFFHWFSKWRKLHRDQEYEVTWYISWSPCTKCTRDVATFLAEDPKVTLTIFVARLYYFWDPDYQEALRSLCQKRDGPRATMKIMNYDEFQHCWSKFVYSQRELFEPWNNLPKYYILLHIMLGEILRHSMDPPTFTSNFNNELWVRGRHETYLCYEVERLHNDTWVLLNQRRGFLCNQAPHKHGFLEGRHAELCFLDVIPFWKLDLHQDYRVTCFTSWSPCFSCAQEMAKFISNNKHVSLCIFAARIYDDQGRCQEGLRTLAKAGAKISIMTYSEFKHCWDTFVDHQGCPFQPWDGLEEHSQALSGRLRAILQNQGN

SEQ ID NO: 36 - protein, 377 aa, Chlorocebus sabaeus
  MISC_FEATURE (1)..(377): Green monkey APOBEC-3G polypeptide sequence
  MISC_FEATURE (1)..(60): Cytoplasmic localization signal
  MISC_FEATURE (65)..(100): Nucleic acid editing domain
  MISC_FEATURE (257)..(290): Nucleic acid editing domain
MNPQIRNMVEQMEPDIFVYYFNNRPILSGRNTVWLCYEVKTKDPSGPPLDANIFQGKLYPEAKDHPEMKFLHWFRKWRQLHRDQEYEVTWYVSWSPCTRCANSVATFLAEDPKVTLTIFVARLYYFWKPDYQQALRILCQERGGPHATMKIMNYNEFQHCWNEFVDGQGKPFKPRKNLPKHYTLLHATLGELLRHVMDPGTFTSNFNNKPWVSGQRETYLCYKVERSHNDTWVLLNQHRGFLRNQAPDRHGFPKGRHAELCFLDLIPFWKLDDQQYRVTCFTSWSPCFSCAQKMAKFISNNKHVSLCIFAARIYDDQGRCQEGLRTLHRDGAKIAVMNYSEFEYCWDTFVDRQGRPFQPWDGLDEHSQALSGRLRAI

SEQ ID NO: 37 - protein, 384 aa, Homo sapiens
  MISC_FEATURE (1)..(384): Human APOBEC-3G polypeptide sequence
  MISC_FEATURE (1)..(60): Cytoplasmic localization signal
  MISC_FEATURE (65)..(100): Nucleic acid editing domain
  MISC_FEATURE (257)..(291): Nucleic acid editing domain
MKPHFRNTVERMYRDTFSYNFYNRPILSRRNTVWLCYEVKTKGPSRPPLDAKIFRGQVYSELKYHPEMRFFHWFSKWRKLHRDQEYEVTWYISWSPCTKCTRDMATFLAEDPKVTLTIFVARLYYFWDPDYQEALRSLCQKRDGPRATMKIMNYDEFQHCWSKFVYSQRELFEPWNNLPKYYILLHIMLGEILRHSMDPPTFTFNFNNEPWVRGRHETYLCYEVERMHNDTWVLLNQRRGFLCNQAPHKHGFLEGRHAELCFLDVIPFWKLDLDQDYRVTCFTSWSPCFSCAQEMAKFISKNKHVSLCIFTARIYDDQGRCQEGLRTLAEAGAKISIMTYSEFKHCWDTFVDHQGCPFQPWDGLDEHSQDLSGRLRAILQNQEN

SEQ ID NO: 38 - protein, 382 aa, Homo sapiens
  MISC_FEATURE (1)..(382): Human APOBEC-3B polypeptide sequence
  MISC_FEATURE (66)..(100): Nucleic acid editing domain
  MISC_FEATURE (251)..(289): Nucleic acid editing domain
MNPQIRNPMERMYRDTFYDNFENEPILYGRSYTWLCYEVKIKRGRSNLLWDTGVFRGQVYFKPQYHAEMCFLSWFCGNQLPAYKCFQITWFVSWTPCPDCVAKLAEFLSEHPNVTLTISAARLYYYWERDYRRALCRLSQAGARVTIMDYEEFAYCWENFVYNEGQQFMPWYKFDENYAFLHRTLKEILRYLMDPDTFTFNFNNDPLVLRRRQTYLCYEVERLDNGTWVLMDQHMGFLCNEAKNLLCGFYGRHAELRFLDLVPSLQLDPAQIYRVTWFISWSPCFSWGCAGEVRAFLQENTHVRLRIFAARIYDYDPLYKEALQMLRDAGAQVSIMTYDEFEYCWDTFVYRQGCPFQPWDGLEEHSQALSGRLRAILQNQGN

SEQ ID NO: 39 - protein, 395 aa, Rattus
  MISC_FEATURE (1)..(395): Rat APOBEC-3B polypeptide sequence
MQPQGLGPNAGMGPVCLGCSHRRPYSPIRNPLKKLYQQTFYFHFKNVRYAWGRKNNFLCYEVNGMDCALPVPLRQGVFRKQGHIHAELCFIYWFHDKVLRVLSPMEEFKVTWYMSWSPCSKCAEQVARFLAAHRNLSLAIFSSRLYYYLRNPNYQQKLCRLIQEGVHVAAMDLPEFKKCWNKFVDNDGQPFRPWMRLRINFSFYDCKLQEIFSRMNLLREDVFYLQFNNSHRVKPVQNRYYRRKSYLCYQLERANGQEPLKGYLLYKKGEQHVEILFLEKMRSMELSQVRITCYLTWSPCPNCARQLAAFKKDHPDLILRIYTSRLYFWRKKFQKGLCTLWRSGIHVDVMDLPQFADCWTNFVNPQRPFRPWNELEKNSWRIQRRLRRIKESWGL

SEQ ID NO: 40 - protein, 226 aa, Bos Taurus
  MISC_FEATURE (1)..(226): Bovine APOBEC-3B polypeptide sequence
DGWEVAFRSGTVLKAGVLGVSMTEGWAGSGHPGQGACVWTPGTRNTMNLLREVLFKQQFGNQPRVPAPYYRRKTYLCYQLKQRNDLTLDRGCFRNKKQRHAERFIDKINSLDLNPSQSYKIICYITWSPCPNCANELVNFITRNNHLKLEIFASRLYFHWIKSFKMGLQDLQNAGISVAVMTHTEFEDCWEQFVDNQSRPFQPWDKLEQYSASIRRRLQRILTAPI

SEQ ID NO: 41 - protein, 490 aa, Pan troglodytes
  MISC_FEATURE (1)..(490): Chimpanzee APOBEC-3B polypeptide sequence
MNPQIRNPMEWMYQRTFYYNFENEPILYGRSYTWLCYEVKIRRGHSNLLWDTGVFRGQMYSQPEHHAEMCFLSWFCGNQLSAYKCFQITWFVSWTPCPDCVAKLAKFLAEHPNVTLTISAARLYYYWERDYRRALCRLSQAGARVKIMDDEEFAYCWENFVYNEGQPFMPWYKFDDNYAFLHRTLKEIIRHLMDPDTFTFNFNNDPLVLRRHQTYLCYEVERLDNGTWVLMDQHMGFLCNEAKNLLCGFYGRHAELRFLDLVPSLQLDPAQIYRVTWFISWSPCFSWGCAGQVRAFLQENTHVRLRIFAARIYDYDPLYKEALQMLRDAGAQVSIMTYDEFEYCWDTFVYRQGCPFQPWDGLEEHSQALSGRLRAILQVRASSLCMVPHRPPPPPQSPGPCLPLCSEPPLGSLLPTGRPAPSLPFLLTASFSFPPPASLPPLPSLSLSPGHLPVPSFHSLTSCSIQPPCSSRIRETEGWASVSKEGRDLG

SEQ ID NO: 42 - protein, 190 aa, Homo sapiens
  MISC_FEATURE (1)..(190): Human APOBEC-3C polypeptide sequence
  MISC_FEATURE (65)..(100): Nucleic acid editing domain
MNPQIRNPMKAMYPGTFYFQFKNLWEANDRNETWLCFTVEGIKRRSVVSWKTGVFRNQVDSETHCHAERCFLSWFCDDILSPNTKYQVTWYTSWSPCPDCAGEVAEFLARHSNVNLTIFTARLYYFQYPCYQEGLRSLSQEGVAVEIMDYEDFKYCWENFVYNDNEPFKPWKGLKTNFRLLKRRLRESLQ

SEQ ID NO: 43 - protein, 190 aa, Gorilla
  MISC_FEATURE (1)..(190): Gorilla APOBEC-3C polypeptide sequence
  MISC_FEATURE (65)..(100): Nucleic acid editing domain
MNPQIRNPMKAMYPGTFYFQFKNLWEANDRNETWLCFTVEGIKRRSVVSWKTGVFRNQVDSETHCHAERCFLSWECDDILSPNTNYQVTWYTSWSPCPECAGEVAEFLARHSNVNLTIFTARLYYFQDTDYQEGLRSLSQEGVAVKIMDYKDFKYCWENFVYNDDEPFKPWKGLKYNFRFLKRRLQEILE

SEQ ID NO: 44 - protein, 202 aa, Rhesus macaque
  MISC_FEATURE (1)..(202): Rhesus macaque APOBEC-3A polypeptide sequence
  MISC_FEATURE (72)..(103): Nucleic acid editing domain
MDGSPASRPRHLMDPNTFTFNFNNDLSVRGRHQTYLCYEVERLDNGTWVPMDERRGFLCNKAKNVPCGDYGCHVELRFLCEVPSWQLDPAQTYRVTWFISWSPCFRRGCAGQVRVFLQENKHVRLRIFAARIYDYDPLYQEALRTLRDAGAQVSIMTYEEFKHCWDTFVDRQGRPFQPWDGLDEHSQALSGRLRAILQNQGN

SEQ ID NO: 45 - protein, 185 aa, Bos Taurus
  MISC_FEATURE (1)..(185): Bovine APOBEC-3A polypeptide sequence
  MISC_FEATURE (56)..(86): Nucleic acid editing domain
MDEYTFTENFNNQGWPSKTYLCYEMERLDGDATIPLDEYKGFVRNKGLDQPEKPCHAELYFLGKIHSWNLDRNQHYRLTCFISWSPCYDCAQKLTTFLKENHHISLHILASRIYTHNRFGCHQSGLCELQAAGARITIMTFEDFKHCWETFVDHKGKPFQPWEGLNVKSQALCTELQAILKTQQN

SEQ ID NO: 46 - protein, 200 aa, Homo sapiens
  MISC_FEATURE (1)..(200): Human APOBEC-3H polypeptide sequence
  MISC_FEATURE (54)..(88): Nucleic acid editing domain
MALLTAETFRLQFNNKRRLRRPYYPRKALLCYQLTPQNGSTPTRGYFENKKKCHAEICFINEIKSMGLDETQCYQVTCYLTWSPCSSCAWELVDFIKAHDHLNLGIFASRLYYHWCKPQQKGLRLLCGSQVPVEVMGFPKFADCWENFVDHEKPLSFNPYKMLEELDKNSRAIKRRLERIKIPGVRAQGRYMDILCDAEV

SEQ ID NO: 47 - protein, 210 aa, Rhesus macaque
  MISC_FEATURE (1)..(210): Rhesus macaque APOBEC-3H polypeptide sequence
MALLTAKTFSLQFNNKRRVNKPYYPRKALLCYQLTPQNGSTPTRGHLKNKKKDHAEIRFINKIKSMGLDETQCYQVTCYLTWSPCPSCAGELVDFIKAHRHLNLRIFASRLYYHWRPNYQEGLLLLCGSQVPVEVMGLPEFTDCWENFVDHKEPPSFNPSEKLEELDKNSQAIKRRLERIKSRSVDVLENGLRSLQLGPVTPSSSIRNSR

SEQ ID NO: 48 - protein, 386 aa, Homo sapiens
  MISC_FEATURE (1)..(386): Human APOBEC-3D polypeptide sequence
  MISC_FEATURE (78)..(109): Nucleic acid editing domain
  MISC_FEATURE (262)..(296): Nucleic acid editing domain
MNPQIRNPMERMYRDTFYDNFENEPILYGRSYTWLCYEVKIKRGRSNLLWDTGVFRGPVLPKRQSNHRQEVYFRFENHAEMCFLSWFCGNRLPANRRFQITWFVSWNPCLPCVVKVTKFLAEHPNVTLTISAARLYYYRDRDWRWVLLRLHKAGARVKIMDYEDFAYCWENFVCNEGQPFMPWYKFDDNYASLHRTLKEILRNPMEAMYPHIFYFHFKNLLKACGRNESWLCFTMEVTKHHSAVFRKRGVFRNQVDPETHCHAERCFLSWFCDDILSPNTNYEVTWYTSWSPCPECAGEVAEFLARHSNVNLTIFTARLCYFWDTDYQEGLCSLSQEGASVKIMGYKDFVSCWKNFVYSDDEPFKPWKGLQTNFRLLKRRLREILQ

SEQ ID NO: 49 - protein, 236 aa, Homo sapiens
  MISC_FEATURE (1)..(236): Human APOBEC-1 polypeptide sequence
MTSEKGPSTGDPTLRRRIEPWEFDVFYDPRELRKEACLLYEIKWGMSRKIWRSSGKNTTNHVEVNFIKKFTSERDFHPSMSCSITWFLSWSPCWECSQAIREFLSRHPGVTLVIYVARLFWHMDQQNRQGLRDLVNSGVTIQIMRASEYYHCWRNFVNYPPGDEAHWPQYPPLWMMLYALELHCIILSLPPCLKISRRWQNHLTFFRLHLQNCHYQTIPPHILLATGLIHPSVAWR

SEQ ID NO: 50 - protein, 229 aa, Mus musculus
  MISC_FEATURE (1)..(229): Mouse APOBEC-1 polypeptide sequence
MSSETGPVAVDPTLRRRIEPHEFEVFFDPRELRKETCLLYEINWGGRHSVWRHTSQNTSNHVEVNFLEKFTTERYFRPNTRCSITWFLSWSPCGECSRAITEFLSRHPYVTLFIYIARLYHHTDQRNRQGLRDLISSGVTIQIMTEQEYCYCWRNFVNYPPSNEAYWPRYPHLWVKLYVLELYCIILGLPPCLKILRRKQPQLTFFTITLQTCHYQRIPPHLLWATGLK

SEQ ID NO: 51 - protein, 224 aa, Homo sapiens
  MISC_FEATURE (1)..(224): Human APOBEC-2 polypeptide sequence
MAQKEEAAVATEAASQNGEDLENLDDPEKLKELIELPPFEIVTGERLPANFFKFQFRNVEYSSGRNKTFLCYVVEAQGKGGQVQASRGYLEDEHAAAHAEEAFFNTILPAFDPALRYNVTWYVSSSPCAACADRIIKTLSKTKNLRLLILVGRLFMWEEPEIQAALKKLKEAGCKLRIMKPQDFEYVWQNFVEQEEGESKAFQPWEDIQENFLYYEEKLADILK

SEQ ID NO: 52 - protein, 224 aa, Mus musculus
  MISC_FEATURE (1)..(224): Mouse APOBEC-2 polypeptide sequence
MAQKEEAAEAAAPASQNGDDLENLEDPEKLKELIDLPPFEIVTGVRLPVNFFKFQFRNVEYSSGRNKTFLCYVVEVQSKGGQAQATQGYLEDEHAGAHAEEAFFNTILPAFDPALKYNVTWYVSSSPCAACADRILKTLSKTKNLRLLILVSRLFMWEEPEVQAALKKLKEAGCKLRIMKPQDFEYIWQNFVEQEEGESKAFEPWEDIQENFLYYEEKLADILK

SEQ ID NO: 53 - protein, 224 aa, Rattus
  MISC_FEATURE (1)..(224): Rat APOBEC-2 polypeptide sequence
MAQKEEAAEAAAPASQNGDDLENLEDPEKLKELIDLPPFEIVTGVRLPVNFFKFQFRNVEYSSGRNKTFLCYVVEAQSKGGQVQATQGYLEDEHAGAHAEEAFFNTILPAFDPALKYNVTWYVSSSPCAACADRILKTLSKTKNLRLLILVSRLFMWEEPEVQAALKKLKEAGCKLRIMKPQDFEYLWQNFVEQEEGESKAFEPWEDIQENFLYYEEKLADILK

SEQ ID NO: 54 - protein, 208 aa, Petromyzon marinus
  MISC_FEATURE (1)..(208): Petromyzon marinus CDA1 (pmCDAl) polypeptide sequence
MTDAEYVRIHEKLDIYTFKKQFFNNKKSVSHRCYVLFELKRRGERRACFWGYAVNKPQSGTERGIHAEIFSIRKVEEYLRDNPGQFTINWYSSWSPCADCAEKILEWYNQELRGNGHTLKIWACKLYYEKNARNQIGLWNLRDNGVGLNVMVSEHYQCCRKIFIQSSHNQLNENRWLEKTLKRAEKRRSELSFMIQVKILHTTKSPAV

SEQ ID NO: 55 - protein, 381 aa, Homo sapiens
  MISC_FEATURE (1)..(381): Human APOBEC3G D316R D317R polypeptide sequence
MKPHFRNTVERMYRDTFSYNFYNRPILSRRNTVWLCYEVKTKGPSRPPLDAKIFRGQVYSELKYHPEMRFFHWFSKWRKLHRDQEYEVTWYISWSPCTKCTRDMATFLAEDPKVTLTIFVARLYYFWDPDYQEALRSLCQKRDGPRATMKFNYDEFQHCWSKFVYSQRELFEPWNNLPKYYILLHFMLGEILRHSMDPPTFTFNFNNEPWVRGRHETYLCYEVERMHNDTWVLLNQRRGFLCNQAPHKHGFLEGRHAELCFLDVIPFWKLDLDQDYRVTCFTSWSPCFSCAQEMAKFISKKHVSLCIFTARIYRRQGRCQEGLRTLAEAGAKISFTYSEFKHCWDTFVDHQGCPFQPWDGLDEHSQDLSGRLRAILQNQEN

SEQ ID NO: 56 - protein, 182 aa, Homo sapiens
  MISC_FEATURE (1)..(182): Human APOBEC3G chain A polypeptide sequence
MDPPTFTFNFNNEPWWGRHETYLCYEVERMHNDTWVLLNQRRGFLCNQAPHKHGFLEGRHAELCFLDVIPFWKLDLDQDYRVTCFTSWSPCFSCAQEMAKFISKNKHVSLCIFTARIYDDQGRCQEGLRTLAEAGAKISFTYSEFKHCWDTFVDHQGCPFQPWDGLDEHSQDLSGRLRAILQ

SEQ ID NO: 57 - protein, 184 aa, Homo sapiens
  MISC_FEATURE (1)..(184): Human APOBEC3G chain A D120R D121R polypeptide sequence
MDPPTFTFNFNNEPWVRGRHETYLCYEVERMHNDTWVLLNQRRGFLCNQAPHKHGFLEGRHAELCFLDVIPFWKLDLDQDYRVTCFTSWSPCFSCAQEMAKFISKNKHVSLCIFTARIYRRQGRCQEGLRTLAEAGAKISFMTYSEFKHCWDTFVDHQGCPFQPWDGLDEHSQDLSGRLRAILQ

SEQ ID NO: 58 - protein, 367 aa, Homo sapiens
  MISC_FEATURE (1)..(367): hAPOBEC-4 polypeptide sequence
MEPIYEEYLANHGTIVKPYYWLSFSLDCSNCPYHIRTGEEARVSLTEFCQIFGFPYGTTFPQTKHLTFYELKTSSGSLVQKGHASSCTGNYIHPESMLFEMNGYLDSAIYNNDSIRHIILYSNNSPCNEANHCCISKMYNFLITYPGITLSIYFSQLYHTEMDFPASAWNREALRSLASLWPRVVLSPISGGIWHSVLHSFISGVSGSHVFQPILTGRALADRHNAYEINAITGVKPYFTDVLLQTKRNPNTKAQEALESYPLNNAFPGQFFQMPSGQLQPNLPPDLRAPVVFVLVPLRDLPPMHMGQNPNKPRNIVRHLNMPQMSFQETKDLGRLPTGRSVEIVEITEQFASSKEADEKKKKKGKK

SEQ ID NO: 59 - protein, 388 aa, Rattus norvegicus
  MISC_FEATURE (1)..(388): rAPOBEC-4 polypeptide sequence
MEPLYEEYLTHSGTIVKPYYWLSVSLNCTNCPYHIRTGEEARVPYTEFHQTFGFPWSTYPQTKHLTFYELRSSSGNLIQKGLASNCTGSHTHPESMLFERDGYLDSLIFHDSNIRHIILYSNNSPCDEANHCCISKMYNFLMNYPEVTLSVFFSQLYHTENQFPTSAWNREALRGLASLWPQVTLSAISGGIWQSILETFVSGISEGLTAVRPFTAGRTLTDRYNAYEINCITEVKPYFTDALHSWQKENQDQKVWAASENQPLHNTTPAQWQPDMSQDCRTPAVFMLVPYRDLPPIHVNPSPQKPRTVVRHLNTLQLSASKVKALRKSPSGRPVKKEEARKGSTRSQEANETNKSKWKKQTLFIKSNICHLLEREQKKIGILSSWSV

SEQ ID NO: 60 - protein, 363 aa, Macaca fascicularis
  MISC_FEATURE (1)..(363): mfAPOBEC-4 polypeptide sequence
MEPTYEEYLANHGTIVKPYYWLSFSLDCSNCPYHIRTGEEARVSLTEFCQIFGFPYGTTYPQTKHLTFYELKTSSGSLVQKGHASSCTGNYIHPESMLFEMNGYLDSAIYNNDSIRHIILYCNNSPCNEANHCCISKVYNFLITYPGITLSIYFSQLYHTEMDFPASAWNREALRSLASLWPRVVLSPISGGIWHSVLHSFVSGVSGSHVFQPILTGRALTDRYNAYEINAITGVKPFFTDVLLHTKRNPNTKAQMALESYPLNNAFPGQSFQMTSGIPPDLRAPVVFVLLPLRDLPPMHMGQDPNKPRNIIRHLNMPQMSFQETKDLERLPTRRSVETVEITERFASSKQAEEKTKKKKGKK

SEQ ID NO: 61 - protein, 218 aa, Rattus norvegicus
  MISC_FEATURE (1)..(218): rAPOBEC-1 (delta 177-186) polypeptide sequence
MSSETGPVAVDPTLRRRIEPHEFEVFFDPRELRKETCLLYEINWGGRHSIWRHTSQNTNKHVEVNFIEKFTTERYFCPNTRCSITWFLSWSPCGECSRAITEFLSRYPHVTLFIYIARLYHHADPRNRQGLRDLISSGVTIQIMTEQESGYCWRNFVNYSPSNEAHWPRYPHLWVRGLPPCLNILRRKQPQLTFFTIALQSCHYQRLPPHILWATGLK

SEQ ID NO: 62 - protein, 218 aa, Rattus norvegicus
  MISC_FEATURE (1)..(218): rAPOBEC-1 (delta 202-213) polypeptide sequence
MSSETGPVAVDPTLRRRIEPHEFEVFFDPRELRKETCLLYEINWGGRHSIWRHTSQNTNKHVEVNFIEKFTTERYFCPNTRCSITWFLSWSPCGECSRAITEFLSRYPHVTLFIYIARLYHHADPRNRQGLRDLISSGVTIQIMTEQESGYCWRNFVNYSPSNEAHWPRYPHLWVRLYVLELYCIILGLPPCLNILRRKQPQHYQRLPPHILWATGLK

SEQ ID NO: 63 - protein, 198 aa, Mus musculus
  MISC_FEATURE (1)..(198): mouse cytidine deaminase polypeptide sequence
  MISC_FEATURE (1)..(30): Nuclear localization sequence
  MISC_FEATURE (183)..(198): Nuclear export signal
MDSLLMKQKKFLYHFKNVRWAKGRHETYLCYVVKRRDSATSCSLDFGHLRNKSGCHVELLFLRYISDWDLDPGRCYRVTWFTSWSPCYDCARHVAEFLRWNPNLSLRIFTARLYFCEDRKAEPEGLRRLHRAGVQIGIMTFKDYFYCWNTFVENRERTFKAWEGLHENSVRLTRQLRRILLPLYEVDDLRDAFRMLGF

SEQ ID NO: 64 - protein, 224 aa, Petromyzon marinus
  MISC_FEATURE (1)..(224): pmCDA-1 polypeptide sequence
MAGYECVRVSEKLDFDTFEFQFENLHYATERHRTYVIFDVKPQSAGGRSRRLWGYIINNPNVCHAELILMSMIDRHLESNPGVYAMTWYMSWSPCANCSSKLNPWLKNLLEEQGHTLTMHFSRIYDRDREGDHRGLRGLKHVSNSFRMGVVGRAEVKECLAEYVEASRRTLTWLDTTESMAAKMRRKLFCILVRCAGMRESGIPLHLFTLQTPLLSGRVVWWRV

SEQ ID NO: 65 - protein, 331 aa, Petromyzon marinus
  MISC_FEATURE (1)..(331): pmCDA-2 polypeptide sequence
MELREVVDCALASCVRHEPLSRVAFLRCFAAPSQKPRGTVILFYVEGAGRGVTGGHAVNYNKQGTSIHAEVLLLSAVRAALLRRRRCEDGEEATRGCTLHCYSTYSPCRDCVEYIQEFGASTGVRVVIHCCRLYELDVNRRRSEAEGVLRSLSRLGRDFRLMGPRDAIALLLGGRLANTADGESGASGNAWVTETNVVEPLVDMTGFGDEDLHAQVQRNKQIREAYANYASAVSLMLGELHVDPDKFPFLAEFLAQTSVEPSGTPRETRGRPRGASSRGPEIGRQRPADFERALGAYGLFLHPRIVSREADREEIKRDLIVVMRKHNYQGP

SEQ ID NO: 66 - protein, 209 aa, Petromyzon marinus
  MISC_FEATURE (1)..(209): pmCDA-5  polypeptide sequence
MAGDENVRVSEKLDFDTFEFQFENLHYATERHRTYVIFDVKPQSAGGRSRRLWGYIINNPNVCHAELILMSMIDRHLESNPGVYAMTWYMSWSPCANCSSKLNPWLKNLLEEQGHTLMMHFSRIYDRDREGDHRGLRGLKHVSNSFRMGVVGRAEVKECLAEYVEASRRTLTWLDTTESMAAKMRRKLFCILVRCAGMRESGMPLHLFT

SEQ ID NO: 67 - protein, 158 aa, Saccharomyces cerevisiae
  MISC_FEATURE (1)..(158): yCD polypeptide sequence
MVTGGMASKWDQKGMDIAYEEAALGYKEGGVPIGGCLINNKDGSVLGRGHNMRFQKGSATLHGEISTLENCGRLEGKVYKDTTLYTTLSPCDMCTGAIIMYGIPRCVVGENVNFKSKGEKYLQTRGHEVVVVDDERCKKIMKQFIDERPQDWFEDIGE

SEQ ID NO: 68 - protein, 194 aa, Artificial Sequence
  Description of artificial sequence: cytidine deaminase polypeptide sequence
MKPQIRDHRPNPMEAMYPHIFYFHFENLEKAYGRNETWLCFTVEIIKQYLPVPWKKGVFRNQVDPETHCHAEKCFLSWFCNNTLSPKKNYQVTWYTSWSPCPECAGEVAEFLAEHSNVKLTIYTARLYYFWDTDYQEGLRSLSEEGASVEIMDYEDFQYCWENFVYDDGEPFKRWKGLKYNFQSLTRRLREILQ

SEQ ID NO: 69 - protein, 192 aa, Artificial Sequence
  Description of artificial sequence: cytidine deaminase polypeptide sequence
MADSSEKMRGQYISRDTFEKNYKPIDGTKEAHLLCEIKWGKYGKPWLHWCQNQRMNIHAEDYFMNNIFKAKKHPVHCYVTWYLSWSPCADCASKIVKFLEERPYLKLTIYVAQLYYHTEEENRKGLRLLRSKKVIIRVMDISDYNYCWKVFVSNQNGNEDYWPLQFDPWVKENYSRLLDIFWESKCRSPNPW

SEQ ID NO: 70 - protein, 280 aa, Artificial Sequence
  Description of artificial sequence: cytidine deaminase polypeptide sequence
MDPQRLRQWPGPGPASRGGYGQRPRIRNPEEWFHELSPRTFSFHFRNLRFASGRNRSYICCQVEGKNCFFQGIFQNQVPPDPPCHAELCFLSWFQSWGLSPDEHYYVTWFISWSPCCECAAKVAQFLEENRNVSLSLSAARLYYFWKSESREGLRRLSDLGAQVGIMSFQDFQHCWNNFVHNLGMPFQPWKKLHKNYQRLVTELKQILREEPATYGSPQAQGKVRIGSTAAGLRHSHSHTRSEAHLRPNHSSRQHRILNPPREARARTCVLVDASWICYR

SEQ ID NO: 71 - protein, 555 aa, Artificial Sequence
  Description of artificial sequence: pYY-BEM3.1; tr|F7B644|F7B644_HORSE polypeptide sequence
MPRGRARERQRRNPMEKLDAEAFSFHFLNMEFVYDRNCSYLCYQVEGRLSGSPVLSEQGVFPNEVCGKTRRHAELCFLDWFRGRLSPDEYYCVTWFISWSPCSNCAREVAEFLKRHRNVELSIFAARLYYCRDHEQGLQSLCNRGAQLAVMLRKDFTYCWDNFVHNSGREFSPWENIDANSDLLARKLEDLLKNPMEKLHRKTFSFHFRNLKFAKGRKCSYLCYRVEGRLSGSPGLSEQGVFLNEVCDENCRHAELCFLHWFRGRLSPHADYRVTWFISWSPCSNCAREVAEFLKQHRNVELHISAARLYYWQRNKPGLRNLRSSGAQLAIMFFWDFRDCWDNFVHNSGRHFIPWKKINVNSRLLATKLEDLLKNPLEKLHPNTFSFHFCNLEFAYDRKYSYLCYQVEGRLSGSPGLSEQGVFLNEVCGKTRCHAELCFLDWFRVRLSPDEYYRVTWFISWSPCFYCAREVADFLKQYRNVKLSIFAARLYYCRDHAQGLRSLCSSGAQLAIMFFWDFRYCWDNFVHNSGREFRPWKKINVNSRLLATKLEDILK

SEQ ID NO: 72 - protein, 437 aa, Artificial Sequence
  Description of artificial sequence: pYY-BEM3.2; tr|D1LZA1|D1LZA1_PANTI polypeptide sequence
MEPWRPSPRNPMDRIDPKTFRFQFPNLRYASGRKLCYLCFQVERDYFYYNDSDWGVFRNEVHPWAPCHAEQCFLSWFRDQYPYRDEDYNVTWFLSWSPCPTCAEEVVEFLEEYRNLTLSIFTSRLYYFWHPNYQEGLCKLWDAGVQLDIMSCDEFEYCWDNFVYHKGMRFQRRNLLKDYDFLAAKLQEILSPGQQRKRDWPFPPRPGAQVDPRSWVQEVTEPGINTRRHPLHLLVSFLLPRPTMNPLQEDIFYRQFGNQHRVPKPYYYRRKTYLCYQLKLPEGTLIDKDCLRNKKKRHAEICFIDKIKSLTRDTSQRFEIICYITWSPCPFCAEELVAFVKDNPHLSLRIFASRLYVHWRWKYQQGLRHLHASGIPVAVMSLPEFEDCWRNFVDHQDRLFQPWRNLDQYSESIKRRLGKILTPLNDLRNDFRNLKLE

SEQ ID NO: 73 - protein, 440 aa, Artificial Sequence
  Description of artificial sequence: pYY-BEM3.3; tr|A0A3Q0DM17|A0A3Q0DM17_TARSY polypeptide sequence
MPMKRMYSNIYFDHFNNQRLLSGQNAPWLCFKVERVENCMLVPLETGVFGNQVSGCCGKTERPVEPTSLTRSVLVSPNPGTELRAQQPSRKGHLGKLGCVEYPSPGLALVMLGYGASTYCPDSSMYCPETCHHPEMCFLYWFEKTLSHEEQYQITWYVSWSPCVNCAEEVAEFLSVHPKVNLTIYAARLYCYQKLNHRQGLRRLCKEGACVKIMNYEEFDHCWENFVYNNYKSFKPWVKLQDNYELLATELDKILRIPMERMPQKKFRFHFQNLIAKDRNTTWLCFEVKNVRKKHPPDLLERGIFQNQVTPRINCHAEMCFLSWFLENMLLHGKRYQVTWYISWSPCSICAEEVAEFLSAHPKVSLTIYAARLYYFWVPGYRQGLRRLVEEGARVEIMNYEEFDYCWENFVSINNEPFQPWEGLHEKYGYLVTKLNNILG

SEQ ID NO: 74 - protein, 453 aa, Artificial Sequence
  Description of artificial sequence: pYY-BEM3.4; tr|A0A3Q0DNJ5|A0A3Q0DNJ5_TARSY polypeptide sequence
MEDNPEPRPRQQMDQDTFIFNFNNDPSVRGRHQTFLCYEVEHLDDDTWVPQDKYLGFLHNQPQSRSNAYCAYHAELCFLELVSSWQLDPAQRYRVTCFISWSPCSSCAQEVAAFLKKNRHVTLRILAARIYDYYQGYEDGLRTLQGVGVDITVMTSAEFGHCWNTFVDHQGSPFQPWEGLDQHSQVIWQRMQDILQVIPAKYLMEKVKYTVTVDILFKGRVPGPRYLMDQNTFTRNFINNLSVSGRRQTLLCYEVERLGGDIWVPLDQLRGFLLSQARDVLNYYQGRHAEPCFLDLVSSWQLDPAQHYRVTWFISWSPCTSCAQAVAAFLRENRHVTLRILAARIYDYHQGYEEGLRTLQRTGAHIDIMTFKEFGHCWNTFVNHKGSPFKSWTGLDQHSQALRKRLQDILHTMASSLWDQSEPKKPIPSQEVTLPESIPPSHGNRFRLVKRPS

SEQ ID NO: 75 - protein, 424 aa, Artificial Sequence
  Description of artificial sequence: pYY-BEM3.5; tr|G5AYU5|G5AYU5_HETGA polypeptide sequence
FCFLSCVHRKPIERIYKKAFRFYFRNLRCAYGRNKTFLCYEVKRERDNKVLHKGVVLNQVEPYMPLHAELRFLSWFHDTLLCPLGSYQVTLYVSWSPCSECAEELTTFLAGHRNVTMTIYVAQLYYCNWKSPNREGLKILIAEDARLRVMFYDEFLYCWRNFVKNDYNNFDPWSLLDENSRYHNRILQNILKGWGRPHRVGPEGEQTATPGGSGGHCISVFSLLRRREMTLKEETFRVQFNNAYKAPKPYRRRVTYLCYQLQEANGDPLTKGCLRTKKGYHAESRFIKRICSMDLGQDQSYQVTCFLTWSPCPHCAQELVSFKRAHPHLRLQIFTARLFFHWKRSYQEGLQRLCRAQVPVAVMGHPEFAYCWDNFVDHQPGPFEPPWAKLEYYSSCLKRRLQQILRSWGVDDLTNDFRNLQLGP

SEQ ID NO: 76 - protein, 385 aa, Artificial Sequence
  Description of artificial sequence: pYY-BEM3.6; tr|A0A2Y9QMV5|A0A2Y9QMV5_TRIMA polypeptide sequence
MLSSPQTPGTRKPMKTLAPDEFSFNFENLRLAHGRNTTFLCFQVETKAPPSLNSPDSGIFQNQDHCPSHHHAEMVFLTWFQKRLSPAQHYEVTWYMSWSPCSRCAVQVAKFLKSNSTVNLSIFVARLYYPRELETKDGLHSLWQAGAQVQIMFFQDFKYCWENFVNNEGKPFQPWKNLDENSKDWDTELKDIHRNTTDLLTEEMFYSQFYNREKKSSIPRKTYLCYQLNEPQPVKRCLHYKKGYHAVTRFIDGIVSMNLDPARSYDITCYFTWSPCNRYARKLVSFIEDYPNLRLKVYTSRLYFHWCWTNMQGLQHLQNSRVTVAVMTFRDFEYCWKNFVDNQGKPFEPWEKLDLYSQSTERRLRRILKPLTPDVLNEDFGNLHL

SEQ ID NO: 77 - protein, 381 aa, Artificial Sequence
  Description of artificial sequence: pYY-BEM3.7; tr|H0XHI0|H0XHI0_OTOGA polypeptide sequence
LSCAFRDPMNRMYPKTFCQNFEKEPCPSNQNSSWLCFEVETKNSAVFFHRGVFRNQPAPPPRAPTSVLLSQGPVKTPCHAEECFLTWIQGVLPPDHHYHVTWYVSRGPCANCANLIVHFLAMHRRVTLTIFAAHLNFFWESDFQQGLLRMDQEGVQLHIMGYEEFEYCWDNFVYNQRKQFVPWNGLNENYEFMVSTLEDILRSPLDRIRQKDFSIHFRNSLWLDDKSTWLCFEVKRTKSPVPLYRGVFRNQSPPKTPCHAEVRFFTWLQDLPPDFCCQFTWYLSWSPCADCADLVANFLAKHRNVSLTIFVARLYYYRDPEMHRGLRRMYQEGANVDIMSVIEFEYCWDNFVYNQGKQFVPWNGLNENYEFLVPRLQEILE

SEQ ID NO: 78 - protein, 337 aa, Artificial Sequence
  Description of artificial sequence: pYY-BEM3.8; tr|A0A3M0K4Y7|A0A3M0K4Y7_HIRRU polypeptide sequence
MYISKKALRRHFDPRVYPRETYLLCELQWEGSRRVWIHWIRNVPDHHAEEYFLEEVFEPRNYGFCNITLYLSWSPCCTCCSKIRDFLKRNPNVKIDIRVARLIYPDYAETRSSLRELNGLQRVSIQVMEAAGLSCIESKNHRISQVERDPKGSSSPTLFTLQDHLKLSNMTESVIQDSVSIQICYQMRILGFQCHIRWKLQPEDFQRNYSPNQIGRVVYLLYEVRWRRGSIWRNWCSNNPEQHAEVNFLENHFHHRPQTPCSITWFLSTSPCGKCSRRILEFLKSQPNVTLEIYAAKLFRHHDIRNRQGLRNLMMNGVTIYIMNLEGNPASLCLSVD

SEQ ID NO: 79 - protein, 237 aa, Artificial Sequence
  Description of artificial sequence: pYY-BEM3.9; tr|A0A3P4LUZ8|A0A3P4LUZ8_GULGU polypeptide sequence
MSFEDYEYCWETFVDHKGMYFQSWDLLRDNDLLAAELKNILRSTMNPLRQEIFYHQFGNQPRAPRPYHRRKTYLCYQLQPHEGPITARVCLQNKKKRHAEIRFIDNIRALRLDRSQTFEITCYLTWSPCPTCAKALAVFVQDHPHISLRLFASRLFIHWCWKYQEGLRLLHRSRIPVAVMRLQEFEDCWRNFVDNQDEPFQPWNKLEQYSESITRRLRRILGHPQNNLENDFRNLHI

SEQ ID NO: 80 - protein, 221 aa, Artificial Sequence
  Description of artificial sequence: pYY-BEM3.10; tr|G5BPM8|G5BPM8_HETGA polypeptide sequence
RRRIEPWQFEASFDPRQLRRETCLLSEVRWGTSPRAWRGCSLNTARHAEVSFMDRLTSEGRLRGPVRCSITWFLSWSPCGACAQAIGEFLRQHPNVSLVIYIARLFWHVDEQNRQGLRDLVTRGVRMQVMSDPEFAHCWRNFVNYSPGQEARWPQVPPVWTWLYSLELHCILLNLPPCLKISRRHHNQLTFFQLILQNCHYQAIPSPVLLASGLIHPFVTW

SEQ ID NO: 81 - protein, 211 aa, Artificial Sequence
  Description of artificial sequence: pYY-BEM3.11; tr|H2M862|H2M862_ORYLA polypeptide sequence
MITKLDSVLLPKKKFIYHYKNMRWARGRHETYLCFVVKRRVGPESLSFDFGHLRNRNGCHVELLFLRHLSALCPGLWGYGATGQGRVSYSITWFCSWSPCANCSFRLAQFLSQTPNLRLRIFVSRLYFCDLEDSREREGLRMLKKVGVHITVMSYKDYFYCWQTFVARKQSKFKPWDGLHQNSVRLSRKLNRILQPCETEDFRDAFKLLGL

SEQ ID NO: 82 - protein, 353 aa, Artificial Sequence
  Description of artificial sequence: pYY-BEM3.12; tr|H0Y0C6|H0Y0C6_OTOGA polypeptide sequence
MYLKTFYRHFNNRPYLSRRNDTWLCFEVKTTSSNSPGSFYSGVFRNQGPRYCPWHTELCFLTWVRPIVSHHHFYQITWYMSWSPCANCAWQVATFLATHENVSLTNYTVRIYYFWRQDYRQGLLRMIEEGTQVYVMSSKEFQHCWENFVDHWGTRWVTCWNRLKKNYEFLVTRLSEILSDPKERISPNTFYNQFNNTPVPRGRKDTWLCFEVKEKNSNSPGSFHRGVFQNQVFSGTSSHARRCPPDHHYEVTWYTSWSPCAHCAWHVVNFLTSNPNVSLTIFAARLYYIYRPEIQQGLRRVFQEGAKVHIMSLKEFKYCWAKLVYNSGMRFMPWYQFNFNFLFPNTTLKGDLH

SEQ ID NO: 83 - protein, 189 aa, Artificial Sequence
  Description of artificial sequence: pYY-BEM3.13; tr|A0A3Q2Z5X6|A0A3Q2Z5X6_HIPCM polypeptide sequence
MDVHFMNFIYHYKNMRWAKGRNETYLCFVVKRRVGPNSLTFDFGHLRNRNGCHVELLFLRYLGRRLSYSITWFCSWSPCANCSAALSQFLSRMPNLRLRIFVARLYFCDMEDSHEREGLRLLQKAGVQVTVMSYKDYYYCWQTFVDRKKSHFKAWEDLHQNSVRLSRKLNRILQPCEMDLRDAFKLLGL

SEQ ID NO: 84 - protein, 190 aa, Artificial Sequence
  Description of artificial sequence: pYY-BEM3.15; tr|A0A2K6NY90|A0A2K6NY90_RHIRO polypeptide sequence
MNPHIRNPMEAMYPGTFYFHFKNLWEADNRNESWLCFAVEVIKHHSTVSWKRGVFRNQVDPETHCHAEKCFLSWFCDNTLSPKKNYQVTWYTSWSPCPECAREVAKFLARHSNVMLTIYTARLYYSQYPNYQEGLRRLNEEGVPVEIMDYEDFKYCWENFVYNGDELFKPWKGLKYNFLFLDSKLQEILE

SEQ ID NO: 85 - protein, 202 aa, Artificial Sequence
  Description of artificial sequence: pYY-BEM3.16; tr|Q6ICH2|Q6ICH2_HUMAN polypeptide sequence
MNPQIRNPMERMYRDTFYDNFENEPILYGRSYTWLCYEVKIKRGRSNLLWDTGVFRGPVLPKRQSNHRQEVDPETHCHAERCFLSWFCDDILSPNTNYEVTWYTSWSPCPECAGEVAEFLARHSNVNLTIFTARLCYFWDTDYQEGLCSLSQEGASVKIMGYKDFVSCWKNFVYSDDEPFKPWKGLQTNFRLLKRRLREILQ

SEQ ID NO: 86 - protein, 202 aa, Artificial Sequence
  Description of artificial sequence: pYY-BEM3.17; tr|G8GPV1|G8GPV1_CERNE polypeptide sequence
MDGSPASRPGHVMDPGTFTSNFNNKPWVSGQRETYLCYKVERSHNDTWVLLNQHRGFLRNQAKNRLHGDYGCHAELCFLGEVPSWRLDPTQTYRVTWFISWSPCFSGGCAEQVRAFLQENTHVRLRIFAARIYDYDFLYQEALRTLRDAGAQVSIMTYEEFKHCWDTFVDHQGRPFQPWDGLDEHSQALSGRLQAILQNQGN

SEQ ID NO: 87 - protein, 181 aa, Artificial Sequence
  Description of artificial sequence: pYY-BEM3.18; tr|Q1WBT6|Q1WBT6_SYMSY polypeptide sequence
MALLTAKTFRLQFNNKRRVTKPYYPRKALLCYQLTPQNGSTPTRGYFKNKKKRHAEIRFINKIKSMGLDETQCYQVTCYLTWSPCPSCAWELVDFIKAHDHLNLGIFASRLYYHWCRHQQEGLRLLCGSQVPVEVMGFPEFADCWENFVDHEEPLSFNPSEMLEELDKNSRAIKRRLEKIK

SEQ ID NO: 88 - protein, 211 aa, Artificial Sequence
  Description of artificial sequence: pYY-BEM3.19; tr|A0A3B4CS14|A0A3B4CS14_PYGNA polypeptide sequence
MDNTNRRKFIYHYKNVRWARGRHETYLCFVVKKRNSPDSLSFDFGHLRNRNGCHVELLFLRYIEVLCPGLWGSGVDGVRVSYAVTWFCSWSPCSNCAQRLTNFLSQTPNLRLRIFVARLYFCDEEDSLEREGLRHLQRAGVQITVMTYKDFFYCWQTFVASRERCFKAWEGLRQNSVRLSRKLNRILQVFISTPVISPLITTHLGQSWAGG

SEQ ID NO: 89 - protein, 315 aa, Artificial Sequence
  Description of artificial sequence: pYY-BEM3.20; tr|A0A087XZI4|A0A087XZI4_POEFO polypeptide sequence
RKVSYSVTWFCSWSPCANCSIRLAQFLHQTPNLRLRIFVSRLYFCDLEDSREREGLRILKKAGVHITVMSYKDYFYCWQTFVAKSQSKFKPWDGLHQNYIRLSRKLNRILQPALDIKKFIYHYKNLRWARGRCETYLCFVVKKKLHLFMFVIVGRNRLFDLNVTMNNKSLYLIPLHLQLLFLRHLGALCPGLWGYGVTGERKVSYSVTWFCSWSPCANCSIRLAQFLHQTPNLRLRIFVSRLYFCDLEDSREREGLRILKKAGVHITVMSYKDYFYCWQTFVAKSQSKFKPWDGLHQNYIRLSRKLNRILQVQFF

SEQ ID NO: 90 - protein, 189 aa, Artificial Sequence
  Description of artificial sequence: pYY-BEM3.21; tr|A0A341AEK4|A0A341AEK4_9CETA polypeptide sequence
MASDRGPSAGDATSRRRIEPWEFEVSFDPRELCKETRLLYEIKWGRSQHVWRHSGKNTTNHVECNFIEKFTSERPFHRSVSCCITWFLSWSPCWECSKAIREFLNQHPRVTLFIYVARLFQHMDPQNRQGLRDLIHSGVTIQIMGPTEYDYCWRNFVNYPPGKEAHWPRYPPPLMKLYALELHCIILVP

SEQ ID NO: 91 - protein, 180 aa, Artificial Sequence
  Description of artificial sequence: pYY-BEM3.22; tr|E2D879|E2D879_MUSMI polypeptide sequence
RNLISRETFNFNFENLCYAKGRKNTFLCYEVTRKDCDSPVSLCHGVFKNKGSIHAEICFLYWFHDKVLKVLTPREEFKVTWYMSWSPCFECAEQVVRFLATHHNLNLTIFSSRLYNVSDPDTQQKLCRLVQEGAQVAVMDLSEFKKCWEKFVDNDGQQFRPWKRLRTNFRYQNSKLQEIL

SEQ ID NO: 92 - protein, 221 aa, Artificial Sequence
  Description of artificial sequence: pYY-BEM3.23; tr|A0A2K5RDN6|A0A2K5RDN6_CEBCA polypeptide sequence
MWEAQSPGLSREWGSVAISPEDPGPLHIGRFLSCAFRHPMNAMYPGIFNFHFRNLRKAYGRNETWLCFTVEGIMNRSTVSWKSGVFRNQVGSDPFCHAEMCFLSWFRHNMLSPKKDYEVTWYASWSPCPECAGQVAEFLARHGNVRLTIFTAHLYYFWNPSFRQGLRRLSQEGASVLIMGYEDFEYCWDNFVYNDGQPFKPWKRLQDNSLSLYITLQEILQ

SEQ ID NO: 93 - protein, 206 aa, Artificial Sequence
  Description of artificial sequence: pYY-BEM3.24; tr|A0A2K5RDN7|A0A2K5RDN7_CEBCA polypeptide sequence
MEASPASRPRPLMGPRTFTENFTNNPEVFGRHQTYLCYEVKCQGPDGTRDLMTEQRDFLCNQARNLLSGFDGRHAERCFLDRVPSWRLDPAQTYRVTCFISWSPCFSCAREVAEFLQENPHVNLRIFAARIYDCRPRYEEGLQMLQNAGAQVSIMTSEEFRHCWDTFVDHQGHPFQPWEGLDEHSQALSRRLQAILQGNRWMILSL

SEQ ID NO: 94 - protein, 184 aa, Artificial Sequence
  Description of artificial sequence: pYY-BEM3.25; tr|A0A1C9CJ69|A0A1C9CJ69_CERAL polypeptide sequence
NPMKAMDPHIFYFHFKNLRKAYGRNETWLCFAVEIIKQRSTVPWRTGVFRNQVDPESHCHAERCFLSWFCEDILSPNTDYRVTWYTSWSPCLDCAGEVAEFLARHSNVELAIFAARLYYFWDTHYQQGLRSLSEKGASVEIMGYEDFKYCRENFVCDDGKPFKPWKGLKTNFRFLKRRLQEILE

SEQ ID NO: 95 - protein, 197 aa, Artificial Sequence
  Description of artificial sequence: pYY-BEM3.26; tr|A0A2R2Z4D2|A0A2R2Z4D2_PTEAL polypeptide sequence
MHLQVWRKVTEAWREGYTLKPWSRNPMERLYHDYFYFHFYNLPTPKHRNGCYICYQVEGTKKHSRMPLLRGVFENQESLDMMLSPGEKYRVTWYISWSPCFACVDEVIKFLREHTNVELIIFAARLYHSDILQYRQGLRKLHDAGVHVAIMSYYEFKHCLNDFVFHQGRSFCPWNDLNKNSKNLSNTLEDILRNQED

SEQ ID NO: 96 - protein, 206 aa, Artificial Sequence
  Description of artificial sequence: pYY-BEM3.27; tr|B7T161|B7T161_SHEEP polypeptide sequence
MTEGWAGSGLPGRGDCVWTPQTRNTMNLLRETLFKQQFGNQPRVPPPYYRRKTYLCYQLKELDDLMLDKGCFRNKKQRHAEIRFIDKINSLNLNPSQSYKIICYITWSPCPNCASELVDFITRNDHLNLQIFASRLYFHWIKPFCRGLHQLQKAGISVAVMTHTEFEDCWEQFVDNQLRPFQPWDKLEQYSASIRRRLQRILTAPT

SEQ ID NO: 97 - protein, 205 aa, Artificial Sequence
  Description of artificial sequence: pYY-BEM3.28; tr|A0A2R2X2G4|A0A2R2X2G4_PTEAL polypeptide sequence
MAGLGQACEGCCGQMPEISYPMGRLDPKTFSFEFKNLPYAYGRKSSYLCFQVEREQHSSPVPSDWGVFKNQFCGTEPYHAELCFLNWFRAEKLSPYEHYDVTWFLSWSPCSTCAEEIAIFLSNHKNVRLNIFVSRIYYFWKPAFRQGLQELDHLGVQLDAMSFDEFKYCWENFVDNQGMPFRCWKKVHQNYKSVLRKLNEILRRR

SEQ ID NO: 98 - protein, 309 aa, Artificial Sequence
  Description of artificial sequence: pYY-BEM3.29; tr|G1Q1M4|G1Q1M4_MYOLU polypeptide sequence
YAELSFLDLFQSWNLDRGRQYRLTWYMSWSPYPDCAQKLVEFLGENSHVTLRIFAADIHSLCSGYEDGLRKLRDARAQLAIMTRDELQYCWVTFVDNQGQPFRPWPNLVEHIKTKKQELKDILGNPMRRMYPKTFNFNFQNLNSYGRKSTFLCFEVETWEDGSVLDYQNGVFQNQLDPGHAELCFIEWFHEKVLFPDEVRCPDAQYHVTWYISWSPCFECAEQVAGFLNEHENVDLSISAARLYLCEDEDEQGLQDLVAAGAKVAMMAPEDFEYCWDNFVYNRGWPFTYWKHVRRNYGRLQEKLDEILW

SEQ ID NO: 99 - protein, 216 aa, Artificial Sequence
  Description of artificial sequence: pYY-BEM3.30; tr|A0A1S3AN78|A0A1S3AN78_ERIEU polypeptide sequence
RRIEPWEFEDFFDPRQFRPETCLLYEVRWGSSRNAWRSTARNTTRHAEVNFLERFAAERHFDKPVSCSITWFLSWSPCWECSQAIGAFLSQHPQVTLAIHVTRLFHHEDEQNRQGLRDLLARGVTLQVMGDSEYAHCWRTFVNSPPGAEGHYPRYPSDFTRLYALELHCIILGLPPCLEILRRYQNQFTLFRLVPQNCHYQMIPHLNFFVVRHYFF

SEQ ID NO: 100 - protein, 201 aa, Artificial Sequence
  Description of artificial sequence: pYY-BEM3.32; tr|Q4VUI3|Q4VUI3_XENLA polypeptide sequence
MTMDSMLLKRNKFIYHYKNLRWARGRHETYLCYIVKRRYSSVSCALDFGYLRNRNGCHAEMLFLRYLSIWVGHDPHRNYRVTWFSSWSPCYDCAKRTLEFLKGHPNFSLRIFSARLYFCEERNAEPEGLRKLQKAGVRLSVMSYKDYFYCWNTFVETRESGFEAWDGLHENSVRLARKLRRILQPPYDMEDLREVFVLLGL

SEQ ID NO: 101 - protein, 191 aa, Artificial Sequence
  Description of artificial sequence: pYY-BEM3.33; tr|E2RL86|E2RL86_CANLF polypeptide sequence
MNPLQEETFYQQFSNQRVPKPTYQRRTYLCYQLKPHEGSVIAKVCLQNQEKRHAEICFIDDIKSRQLDPSQKFEITCYVTWSPCPTCAKKLIAFVNDHPHISLRLFASRLYFHWRQKYKRELRHLQKSGIPLAVMSYLEFKDCWEKFVDHKGRPFQPWNKLKQYSESIGRRLQRILQPLNNLENDFRNLRL

SEQ ID NO: 102 - protein, 226 aa, Artificial Sequence
  Description of artificial sequence: pYY-BEM3.34; tr|G1LWB0|G1LWB0_AILME polypeptide sequence
SSAAPASIHLLDEDTFTENFRNDDWPSRTYLCYKVEGPDQGSGVPLGQDKGILHNKPAQGPEPSRHAECYLLEQIQSWNLDPKLHYGVTCFLSWSPCAKCAQKMARFLQENSHVSLKLFASRLYTRERWDEDYKEGLRTLKRAGASIAIMTYREFEHCWKTFVLHDQEGSCFQPWPFLHKESQKFSEKLQAILQVGVLLLSLPPPLPSSPLSSPWPFPAPLRASTG

SEQ ID NO: 103 - protein, 238 aa, Artificial Sequence
  Description of artificial sequence: pYY-BEM3.35; tr|A0A1U7S7K7|A0A1U7S7K7_ALLSI polypeptide sequence
MGEHWQYAGSGEYIPQDQFEENFDPSVLLAETHLLSELTWGGRPYKHWYENTEHCHAEIHFLENFSSKNRSCTITWYLSWSPCAECSARIADFMQENTNVKLNIHVARLYLHDDEHTRQGLRYLMKMKRVTIQVMTIPDYTYCWNTFLEDDGEDESDDYGGYAGVHEDEDESDDDDYLPTHFAPWIMLYSLELSCILQGFAPCLKIIQGNHMSPTFQLHVQDQEQKRLLEPANPWGAD

SEQ ID NO: 104 - protein, 220 aa, Artificial Sequence
  Description of artificial sequence: pYY-BEM3.36; tr|A0A2R2X2J8|A0A2R2X2J8_PTEVA polypeptide sequence
MPRIGNMNLLSEKTFNYHFGNQLRVKKPQGRRRTYLCYKLKLPNETLVKGYFINKKKNHAEIRFINKIRSLNLDQTQSYKITCYITWSPCSYCAGKLVALVKSCPHLSLQIFTSRLYYHWLWKNQAGLRYLWKINISVLVMKEPEFADCWDNFVNHQSRRFKPWEKLTQYSNSTERRLLRILRINRTDLFLAQSSEQDPGLNDLVDAIKRLFLDAHRPRD

SEQ ID NO: 105 - protein, 198 aa, Artificial Sequence
  Description of artificial sequence: pYY-BEM3.37; tr|A0A151P6M4|A0A151P6M4_ALLMI polypeptide sequence
MAVEEEKGLLGTSQGWKIELKDFQENYMPSTWPKVTHLLYEIRWGKGSKVWRNWCSNTLTQHAEVNCLENAFGKLQFNPPVPCHITWFLSWSPCCQCCRRILQFLRAHSHITLVIKAAQLFKHMDERNRQGLRDLVQSGVHVQVMDLPDYRYCWRTFVSHPHEGEGDFWPWFFPLWITFYTLELQHILLQQHALSYNL

SEQ ID NO: 106 - protein, 158 aa, Artificial Sequence
  Description of artificial sequence: pYY-BEM3.38; tr|A0A2K6MNR2|A0A2K6MNR2_RHIBE polypeptide sequence
IWLCFTMEIIKQCSTVSWKRGVFRNQVDPETHCHAERCFLSWFWEDTLSPNTNYQVTWYTSWSPCLDCAGEVAEFLARHSNVKLAIFAARLYYFWDTDYQQGLRSLSEEGTSVEIMGYEDFKYCWENFVYNGDEPFKPWKGLKYNFLFLDSKLQEILE

SEQ ID NO: 107 - protein, 182 aa, Artificial Sequence
  Description of artificial sequence: pYY-BEM3.40; tr|F1CGT0|F1CGT0_ANOCA polypeptide sequence
KAAILLSNLFFRWQMEPEAFQRNFDPREFPECTLLLYEIHWDNNTSRNWCTNKPGLHAEENFLQIFNEKIDIKQDTPCSITWFLSWSPCYPCSQAIIKFLEAHPNVSLEIKAARLYMHQIDCNKEGLRNLGRNRVSIMNLPDYRHCWTTFVVPRGANEDYWPQDFLPAITNYSRELDSILQD

SEQ ID NO: 108 - protein, 230 aa, Artificial Sequence
  Description of artificial sequence: pYY-BEM3.41; tr|C7AGG3|C7AGG3_HORSE polypeptide sequence
MDPQAPTQRGGLGQAYQGGDYVQAPGNGNTQHLLSEDVFKKQFGNQRRVTKPYYRRKTYVCYQLKLLRGPTIAKGYFRNKKKRHAEIRFIDKINSLGLDQDQSYEITCYVTWSPCATCACKLIKFTRKFPNLSLRIFVSRLYYHWFRQNQQGLRQLWASSIPVVVMGYQEFADCWENFADNRGNPFQSWEKLTEYSKGIKRRLQKILEPLNLNGLEDAMGNLKLGSVDLG

SEQ ID NO: 109 - protein, 197 aa, Artificial Sequence
  Description of artificial sequence: pYY-BEM3.42; tr|A0A250YMK7|A0A250YMK7_CASCN polypeptide sequence
MSLLKEDIFLYQFNNQQQVQKPYFRRRTYLCYQLEQPNGSRPQWPAKGCLQNKKGHHAEIRFIKRIHSMGLEQDQDYQITCYITWSPCLACACALAELKNHFPRLTLRIFASRLYFHWIRKFQMGLQHLYKSGVLVAVMSLPEFTDCWEKFVNHRQVFFTPWDKLEEHSRSIQRRLRRILQSWDVDDLTDDFRNLRL

SEQ ID NO: 110 - protein, 189 aa, Artificial Sequence
  Description of artificial sequence: pYY-BEM3.43; tr|B7T160|B7T160_SHEEP polypeptide sequence
MPWISDHVARLDPETFYFQFHNLLYAYGRNCSYICYRVKTWKHRSPVSFDWGVFHNQVYAGTHCHSERRFLSWFCAKKLRPDECYHITWFMSWSPCMKCAELVAGFLGMYQNVTLSIFTARLYYFQKPQYRKGLLRLSDQGACVDIMSYQEFKYCWKKFVYSQRRPFRPWKKLKRNYQLLAAELEDILG

SEQ ID NO: 111 - protein, 541 aa, Artificial Sequence
  Description of artificial sequence: pYY-BEM4.1; tr|A0A182D0J1|A0A182D0J1_BLAVI polypeptide sequence
MTNPESPPQAPCDFNEDALLNREPLRGSPIKFVSPVDYPDLVFALAGPVGVDIDYIQQSISDCLKSFDYSTEFIRITEIMQDIKCSKTIDCTDMLKEYQSKIEYANELRRAYRAKDLLAALTISAISKLREQIKERDEATNKSNIQPSRRKLAWVVRQLKTPEEVRLLRAVYGKQFVLVSIYSSPQRREDFLISKIKIKSRGTIDNNTSSEGAQRLIERDSKEDNEYGQNLSGTFCLGDIFVDSNNKESAIVSIDRFLNAFFGSNEISPTRDEYGMYLAKTASLRSCDLSRQVGAAIFSKTGEIISLGSNEVPKAGGGTYWTGDNADSRDIRLGHDPNEINKVEIFAEIISRLLEDKLLSNDLLNKDAASIVTILLSKNEGKRYKDLRVMDIIEFGRIIHAEMSAICDAARNGRAIIGATLFCTTFPCHLCAKHIVASGIGRIVYLEPYPKSYAKKLHSDSIQVEDHSDSEKVSFEPFIGISPSRYRELFEGGRRKDPFGEALKWKNDPRKPVIDVVVPPHFEAEKLVIAQLGKLIVSGTG

SEQ ID NO: 112 - protein, 330 aa, Artificial Sequence
  Description of artificial sequence: pYY-BEM4.2; tr|A0A2D6EXD2|A0A2D6EXD2_9ARCH polypeptide sequence
MIIGLVGTIGAGKQTIIDYLQEKYGYNALSCSDVLREILKKQGKPVTRDNLREIGNKTREEGGNGAIAKILLEKLRNNWKANYIVDSLRHPDEVSVLRTSPLFHLVAVDADLRIRFERVKARKREEEPTTLPAFVERDQKEMFGTGNEQRIRETMELADELVLNNGTVEELKQRIDDLNLVSDERLRPSWDDYFMRLARLAAQRSNCMSRKVGAIITKDRRVIATGYNGTPRGVKNCNEGGCERCNSAVAKGTAISECLCLHGEENAIIEAGRVRSEGATIYTSFLPCLWCTKMIIQAGLKEVVFSEVYDLHEASIKLFETSGVLIRRLK

SEQ ID NO: 113 - protein, 367 aa, Artificial Sequence
  Description of artificial sequence: pYY-BEM4.3; tr|F7YVM7|F7YVM7_9THEM polypeptide sequence
MNEFKYMSLALKLAKKGKYTTSPNPMVGAVIVKDGKILATGYHKKAGQPHAEINALSKLNFQAQNCEMYVTLEPCSHYGRTPPCADAIIRSGIRKVVIATLDPNPLVNGKGVEKLKNAGIEVVCGVLEEKAKKLNEKFFKYITTKIPFVALKIAQTLDGKIALKNGESKWITSEKSREYVHKLRMEYDAVLTGIGTILKDDPQLNVRLKKVYKQPLRIILDSKLKIPLSAKVLEDPSKVIILTTALADKEKLEELRSKGVEVIITNEKNGIVDLESALKILGEKKITSVMVEAGPTLLTSFLKESLFDKIYLFIAPKIFGADSKSVFSELGLEDISKSQKFSLESVKKIGEDLLLELYPKQLKKLEE

SEQ ID NO: 114 - protein, 449 aa, Artificial Sequence
  Description of artificial sequence: pYY-BEM4.4; tr|A0A3M6UNF1|A0A3M6UNF1_9CNID polypeptide sequence
MEEKSELENELMRSTSPKPSVPNGSKGNECEQRETRITKENLYMVLALWMEEFPVVEQTSSAKRLNKVGVVFVLPTDRVLAADCSRDGVHGVARVMVNHCGKLEGCKVFVSRKPCSLCAKLLVQSKVSRVFYLPIEPESENKGEIARADNLFKNSSVGQSVFVPCVEQKVLDKLEDKLPKEIITPDDISECRDNLLKKCGWSAEWFARAQASLPWPCFEGKMKSQVDNDFKSLIKWIAVVKAPMDKGVAFPKVKLTSDSRVVPDCDADNFPDSKTAYHMMIFAKMLARQTDDPKTGVGAVIVRGKVPDIVSLGWNGFPSKALYGEFPRASDDDRALQKKFPYVIHAEQNALMVRNVKDLTDGILFVTKPPCDECAPMIKLSGVKTIVIGEKIEKSRGGELSYNLIKEYIKEGIMTCYQMEATKTKAKRLASDPETRKRLKSSCSNSNDV

SEQ ID NO: 115 - protein, 414 aa, Artificial Sequence
  Description of artificial sequence: pYY-BEM4.5; tr|A0A2G3K826|A0A2G3K826_9BURK polypeptide sequence
MTKIIDDVNTAAAAVLDQATAAANQTTFAVGGVMVNNQTGEVISAIHNNVIIPLSNNVSFTFDPTAHGERQLVYWYYANKEALKLPEPNQITVITSLDPCAMCTGALLTAGFNVGVVAIDTYAGINCAQNFQFATLPANLRTKAQKNFGYYASGAANFKPLTRSYVGGPSVAFKNGVVTPANLRDCGTVFTQSVDTVRNTSNSTGLAPSQMSNPAELPSNSAILQAYRAIYKKAFTIKIDNPRLPDAQILTELKAVLADAPNARNAVAFIDPFGNLVLCMADAFNTSPVHAAFMNVTQEYAKTRWDLMNKYAQASTTDNPALYLTHPKYGTFVYLYAPDPDDSITIMSLGAYGSTMEGPIPNMFPSNLQFYYPPRNGAQFSELVPVVNELPPFYTQNVNISLMQVPGVTQAPTK

SEQ ID NO: 116 - protein, 308 aa, Artificial Sequence
  Description of artificial sequence: pYY-BEM4.6; tr|K1ZCJ4|K1ZCJ4_9BACT polypeptide sequence
MSSRAKKNRSTNLKKSIGQKSIENKPTDQKKDQVLVAYVPVIHEGYRRFFRHFPAVKELWLISQELSHELRSLQKDIRALKASETKKLLQTWGQFQKIKLLTPSSLAILQKTTTQLVFPDEEISHHLVEKYFAQNRVLFASFFLRWDKKSSLKKHDLQEYSEISNKEFDQMMIAIAQQEADKSDDWWRQVGGLIFKDETILLLAHNQHTPTEAEAYFAGDPRADFHQGEYLKISTAIHAEAYLIAQAAKQGISLEGADLYVTTFPCPVCAKQVAYSGIKRVFFREGYSLLDGETILKANGVKLIRVTV

SEQ ID NO: 117 - protein, 615 aa, Artificial Sequence
  Description of artificial sequence: pYY-BEM4.7; tr|A0A1G3PNQ8|A0A1G3PNQ8_9SPIR polypeptide sequence
MRDLPLLVLGLTGPMGAGCTRFARDISKMEPGKVIKKQGLLDQVAHEISELSKKASEIRLQCISNGKNSELAELKRLNRRLNAKLAERACLHVIAKSSLPEPLFISLNTIVIKIAVDSITAPEFAEWAKNHAKVADLLKWLRTQWESELTLYETWGQDAGRFSQDELEKMDAMFAEFERIGDEILKEDFETYFGKRNNDFSIRMFSENIRLSGNPFRPAENGGGGGKYDEPSMVMIARETDRYIRFYRTRSDQKRSHFFIIDEIKNPREAEYFRARHQNFFLVSIFSSSEIRASRMRRGLGHDAGVSDADFQHLFRELDSRDWGADDFDAHGLHRQNIYRCFNLADIAINNDVEDERFSEVLFNKFIRYYALMLSPGCVQPTPQETYMHLAYSLSLRSTCISRQVGAVITDLEDRILSLGWNEVPEGQIGCGLKVKKDYTDKENPLFEMEIWDNVITAEDLAVWDDEDSICVKDILSRIEIKTKLKSVSLTPEERADVLKALRIKRLEYSRSLHAEENAILQVASRGGVGLKDGTIYVTTFPCELCSKKIYQVGISKIYYTEPYPNSISEKVILKDGIRNIKILQFEGVKSYSYFKLFKPGFDKKDAQMLEGRGI

SEQ ID NO: 118 - protein, 291 aa, Artificial Sequence
  Description of artificial sequence: pYY-BEM4.8; tr|A0A1G0PGF4|A0A1G0PGF4_9BACT polypeptide sequence
MKHNNQLRKEIEKLLGQNSIIKNDELKKLQKEYKIETDELLISFLPYAAEFAKVPISKYKVGAVVLGKSGNIYFGSNMEFEAGALSATVHAEQSAVNNAWLNGETGINKIAVTAAPCGYCRQFLNELTTAKQLHVLLKDKNLEAAKVFKLTELLPEAFGPRDLEIEGGLMKVENHKLKIENINDELINAALEAANKSYAPYSKNYSGVSIQLSDGTIFSGRYSENAAYNPSLLPFQSALAFMNMNTKKGSNNKIVDAVLVEAVSNISQKDAAGTLLNSISKTKLRYYKIKN

SEQ ID NO: 119 - protein, 398 aa, Artificial Sequence
  Description of artificial sequence: pYY-BEM4.9; tr|A0A0P4WGY5|A0A0P4WGY5_9EUCA polypeptide sequence
MEENSSATSQPKCASRTKQGGNDLSTDMSNLSVGETKRTDFLPWDDYFMAVAFLSAMRSKDPSSQVGACIVNADKKIVGIGYNGMPIGCSDDELPWNKESLDPLQTKYMYVCHAEMNAIMNKNSSDLAGCCVYVALFPCNECAKLVIQAGIREVVFFSDKHQQKPETVASKKMLNMAGVAYRQYTPSQSKIELNLSLKEQEKSEPTADITQSSERDQNSKRKDYLSWEEYFMAMAHLSALRSKDPITQVGACIVNSKKKIVGIGYNGMPLGCNDDLMPWGNSSSNKLETKYMYVCHAGVNAIMNKNSCDVSGCTLYVALFPCNECAKVIIQAGIKTIIYASDTNKDQASILASKKMLDMAGIKYRADNLSQRKIVIDFKTIDWNSRFMNDHQNDPTCL

SEQ ID NO: 120 - protein, 259 aa, Artificial Sequence
  Description of artificial sequence: pYY-BEM4.10; tr|A0A3D8IG27|A0A3D8IG27_9HELI polypeptide sequence
MRKNILYFILTLFFLSGLYATSLPEDNVVSGVIYEKIDTVSAEVDHIYPMLALAIVYKDWQEKNMLNKQGHNIGLVIVDENNMPVFWVRNSVHATHNGTQHGEVRLVSNLLNCEGFNKYLDKYTLYTTLEPCIMCAGMLSMVQIPKVVYAQKDLSCGNTQEIISTAKYPRYYKAFTVENGYKKDLEECFEQYKICKNDSITDFLVNDSAKEIFRKASNDLQDYKVKFKENRRVIKVAQEFLQNIQTKDNLDVLQCPKNM

SEQ ID NO: 121 - protein, 256 aa, Artificial Sequence
  Description of artificial sequence: pYY-BEM4.11; tr|A0A351C8C4|A0A351C8C4_9BACT polypeptide sequence
MNELTKQSEHLRNEALRIATRSYVPYTGQQEGVIILLENGDLIPGVRVENASFQLTIPALQNALSTMYALQRTDISMIVSSIPFTDSDLAYTGGMAEIAWEMVGASLLLVAGAHIPEAGTFIDPARGENLLDVSREAALNAFIPESDFPVGSAIQTSDDVVIDGCNVEHSDWSKIICAERNVLSTARSYGLGQITTIYVSCPKEPGGTPCGACRQVIVELAPDATVWMDRGNQEPIAMKATKLLPGHFTGNVLKKQ

SEQ ID NO: 122 - protein, 301 aa, Artificial Sequence
  Description of artificial sequence: pYY-BEM4.12; tr|A0A1G6V2K7|A0A1G6V2K7_PEPNI polypeptide sequence
MPIVRVNEIGARLPEDWEALETAIWQAYVSREDLPDAGELDLTLVDDATIQELNKTHRQLDKSTDVLSFPMYDDRDDLAADVQAGLPVILGDIMISVPTAERQAQAYGHSFKREMAYLLVHGLLHIAGYDHMSAEEKSAMRRAEEAILADVDVPRDTAPSKTAAVLDEADVQALIDAARAARLQAYAPYSGYAVGAALLAADGRRFCGVNVENASYGATCCAERTALFAAVTAGARDFIALALVTEGDEPAPPCGLCRQALAEFSPDLAIYLAGPTGETYRRTSLAALFPEAFSLSTKESV

SEQ ID NO: 123 - protein, 528 aa, Artificial Sequence
  Description of artificial sequence: pYY-BEM4.13; tr|F2NP91|F2NP91_MARHT polypeptide sequence
MPVMETHALEARFKEALARLCPEGRLLAAVSGGGDSVALLYLLKAAGRDTIVAHLDHALRPDSAADAAFVEKLAQRLGFPLETEHVDVRALAHRKRINLEAAAREVRYAFLARVARRWKARCILTAHTLDDNAETVLLQILRGAGRGLGIRPLQRRVARPLLEFSRAELRAYLEARGARWLEDPTNRSLELDRNYLRHAVLPRITARFPHALEALARFSQAQQADDWALEALSARHLIPDRRWPVPAYRALPLERAPEALRRRAIRGVLEALGVRPEARLVADVEAALGGRAQTLPGGVVVRRQRGTLFFIPPTVRFPKVQPPAGLEARPPRPGDYLVFPYGRKRLVDFLNERGVPRELKRRWPVGAVGAEVRWVYGLWPEPDEDRYMRRALVLARAAARQGEVPIGAVLVRDGAVLAEAANAVEASRDATAHAELLALRTALRRVGEKVLPGATLYVTLEPCPMCYGAILEARVARVVYGVENLKAGAFTVHGLEPRVALEAGRVEGECAKVLKDFFARLRPGRDGA

SEQ ID NO: 124 - protein, 226 aa, Artificial Sequence
  Description of artificial sequence: pYY-BEM4.14; tr|A0A316TX77|A0A316TX77_9BACT polypeptide sequence
MINGYTPYSGNQNTCYVKGESGTFYPGVRIENVSYPLTISSVQAAVCSCLANSDNPVEYYTGDHQPELLQVWADEYDMKPGGKLPDSPLKLFDPLVPSIPDIKKELDVLTEKSVTPNSGFPVSALLQTEKGYIRGVNIELSSWALGLCAERVAISRALTAGYTQFKSIHIYAPEADFVSPCGACRQVLLEVMPDADTELYHGDGTLSKHIVSDLLPFGFTSHKLKK

SEQ ID NO: 125 - protein, 321 aa, Artificial Sequence
  Description of artificial sequence: pYY-BEM4.15; tr|R6VYG3|R6VYG3_9FIRM polypeptide sequence
MIHKGTQTIETKRLILRAFTPDDAEAAFENWMSDPKVTEFLRWKTHADISDSRKIVNEWANGSADPEFYQWAIVPKDVNEPIGTISVVDRNDALGIFHIGYCIGSKWWHKGITSEAFSAVIHFLFEEVGANRIESQHDPENIHSGDVMKKCGLTFEGTLRQADFNNRGIVDACVYSILQSEWQNNTSVWQRLYNAALTVQNDRVVSPFIDAGGVAAALMTKKGNIYTGICIDTASTLGMCAERNAVANMLTNGESRIDKIVAVMPDGKVGAPCGACREYMMQLDRDSGDIEILLDLETEKTVRLKDLIPDWWGAERFGDTE

SEQ ID NO: 126 - protein, 229 aa, Artificial Sequence
  Description of artificial sequence: pYY-BEM4.16; tr|A0A3C1HZ18|A0A3C1HZ18_9BACI polypeptide sequence
MGDIMENWNELSEPWKRCFLQAWKAYCHGSIPIGAVLVDSEGEIFLEGRNRVHELTAPEGQLCDCRIAHAEMNVLVQVKTSDYEKLSGATIYSTMEPCIQCFGAIILSRIKNISFAAIDDKLAGATTLEDRHGFIKSRNLNIAGPFSHLGEIQIILRTDFLLRIFDSEYADPLIAAHEKDYPIGVALGRHYHRNNRLQVAKKETIPFGELFNEFSFDIKRAREGYTLGK

SEQ ID NO: 127 - protein, 205 aa, Artificial Sequence
  Description of artificial sequence: pYY-BEM4.17; tr|A0A1M6KV24|A0A1M6KV24_9BACT polypeptide sequence
MEASQQNILLKIEGKGPVAEINFTVTLPEWLVEQVQSGSTVFLTQKEKMRFVLELARKNVAQETGGPFAAAVFSLESGELVSAGVNVVVESRCSSAHAEVVALSLAQKAVDSHDLGAAGLPRMVLVSSAEPCAMCMGAIPWSGVKQVICGARDEDVRSVGFDEGAKPLEWVEDFAERGIEVIRDVLREEATEVLWDYRERGGEIY

SEQ ID NO: 128 - protein, 207 aa, Artificial Sequence
  Description of artificial sequence: pYY-BEM4.18; tr|A0A2U0T9B4|A0A2U0T9B4_9RHIZ polypeptide sequence
METAELISRLLDVIEKDIAPVTAKGVARGNKLFGAAILKKSDLAVIVAETNNEIENPLWHGEMQAIKRFFELPADQRPATRDCLFLATHEPCSLCLSGITWSGFDNFYYLFSHQDSRDGFAIPYDIQILKSVYAVPEPETGTVSPARDLYNRSNDFWTSHGLQDMIAGLARSNREALLARIDDLNALYAELSERYQRDKGGKGIPLP

SEQ ID NO: 129 - protein, 231 aa, Artificial Sequence
  Description of artificial sequence: pYY-BEM4.19; tr|A0A2K9PN08|A0A2K9PN08_9FLAO polypeptide sequence
MSDKKESKIKISKTSESIELDEIHSLLSYSIVQKFWENDDRNGRGYNVGVILVDENKNIVDWDINSVNKTENSTQHGEMRLISRYLDKDELYSLKGYTMYPTLEPCAMCAGMMTMTNVYRTVNGQMDYFYSKALERLSIDTRECGGYPPYPRTVISEISPSSISTRLDAEYKQYTNAGNKPIITKFLSTYKAKTIYDDAFNQFINFKCKFPENKTKYENAIKFYNSLPESI

SEQ ID NO: 130 - protein, 330 aa, Artificial Sequence
  Description of artificial sequence: pYY-BEM4.20; tr|F4PWM7|F4PWM7_CAVFA polypeptide sequence
MRFSLSLLFVILSVLLAGVLACKDPYNPETVDYGQCASATKANYEVRSDSKVLTPADLPADELAVHESRMRHIIDIARVNNKKFVSSIYFPNGTLACIGINTGKPNMIAHGEIVAIQNCTEIHGISMYTNYSIYTTGEPCSMCASAILWSRFKTVVWSTYNSDLYCKICMSNIPIDSSYIFSRAYGLGIEAPVAIGGVVKAEGDAWFGTYCNRPTSIYYIAPKCACQDPAKVSPLKFTQTRTTVWVEGGDKVVTQWNAIISNPSNSTIVDPPIVISPSVVFKGAPWGISAASEPNTYKLSYNKVLFPGQTFSFGYSVYGLEEVAFTALEA

SEQ ID NO: 131 - protein, 193 aa, Artificial Sequence
  Description of artificial sequence: pYY-BEM4.21; tr|U7QZM1|U7QZM1_PHOTE polypeptide sequence
MNKTRRKLLATLGIMSISMSFIAQAGEKKTQVINNILSKQEITEHEKYMREAIKEAIKNPKHPFGAVIVNRNNGEILSRGVNTGRNNPILHGEIQAINHYITQYGNQGWENVALYTTGEPCSMCMSALVWIGIREVIWATSISVIRNSGIRQIDISAHEIAERASSFYNPITLVGGILANETDKLFLERKRGN

SEQ ID NO: 132 - protein, 319 aa, Artificial Sequence
  Description of artificial sequence: pYY-BEM4.22; tr|A0A081CH48|A0A081CH48_PSEA2 polypeptide sequence
MASRRHLLATQVTGNHRKLSLWHLRGWLSPYTKLVDAVYFLTTNSFYHSLQTPPVQSITMLLSSIITSLALAAQASAYREGLHPEFQSGLSINSVPATDRDHWMRLANSAIYYPPVSHPCPQAPFGTAIVNTTSNELICAIANRVGSTGDPTQHGEITAIQHCTNVMRKKGLSPQEIIAAWKQLSLYTNAEPCTMCLSAIRWAGFKEVIYGTSVGTISENGRNQIYIPSNLVLEKSYSFGHATLMLGNILTHETDPFFQHQFNESAPCPVGCERTQVGEARVKTCEPVPNWQKLVRLEYSEDSRVGSEPVAHTPLHLEL

SEQ ID NO: 133 - protein, 203 aa, Artificial Sequence
  Description of artificial sequence: pYY-BEM4.23; tr|A0A3D3HMU1|A0A3D3HMU1_9GAMM polypeptide sequence
MDYSDAILGAITSIRRNSKQPGVNVTDNVTDSSTQYNNDEYWMRRALALAREAGEAGEIPVGAVLVKDNQQVAGGFNQPIRSHDPAAHAEILTLREAGAVLGNYRLIDTTLYVTLEPCMMCAGALVHSRIKRLVFGAAEPKTGAAGSFIDLLTLPRLNHYMEVTGGVLGEECSVLLSDFFRRRRAEKKALKRQNSESGSDSAS

SEQ ID NO: 134 - protein, 270 aa, Artificial Sequence
  Description of artificial sequence: pYY-BEM4.24; tr|A0A1N5WT13|A0A1N5WT13_9ACTN polypeptide sequence
MLEKIERRLVAAAEAVVRSPSTGDAHTVAAAAMDANGDIYSGVNVFHFTGGPCAELVVIGSAAAANAPPLITIVAVGDGDRGVIAPCGRCRQVMLDLHPDVFVIVPTGDGQLAAKPVRELLPFGYVARTGSTAPRVVYFHPRHYDTISSGLKTATVRFQDSVQTGPAVFVFDDGESIRRLDAVVEKVESRRLDHLTEEDAHHEALPDSDALRDAIKTQYPMLGDGDVVDVATFRLTAISAPDPDPRSSYPPAVSRCNPAGPRADLLVGQS

SEQ ID NO: 135 - protein, 257 aa, Artificial Sequence
  Description of artificial sequence: pYY-BEM4.25; tr|X0SAC5|X0SAC5_9ZZZZ polypeptide sequence
MTKDGRVIASAHDTEVTDQDSTAHAEINAIRKASKIYRKDLTGCLIISTHEPCPMCTGSIIWSNISKVVYGVSIRDSIKAGRDMINLSCKEIIKKPNAEINIYDGILKKECLKLYNNDTRKLVKKFRKYEWINIEENLLNKRMQWFENNKTMIRKLKGNDLEKAYHLILMKIGIKRSEAPIVKKSESKIIFHSKNYCPSLEACIILDLDTREVCKEIYERPTEELIRRLNSKLRFTRNYDCIRPYSDYCEEIIILEK

SEQ ID NO: 136 - protein, 154 aa, Artificial Sequence
  Description of artificial sequence: pYY-BEM4.26; tr|A0A3B8IC10|A0A3B8IC10_9BACT polypeptide sequence
MPSHEDFIHQCLELGKEALLQGNPPVGSVIVWQDQVIGRGIENGRSSGDITQHAELLALQEAVATGQRDKLKEAIIYSTHEPCVMCAYPIRQYKIPTVVYSVAVPELGGHTSSWHLLTTEDVPKWGKAPKIITGISAEEVEALNAAFQDSLKKG

SEQ ID NO: 137 - protein, 180 aa, Artificial Sequence
  Description of artificial sequence: pYY-BEM4.27; tr|A0A2N9P8B9|A0A2N9P8B9_9FLAO polypeptide sequence
MFIFKLISPPVSIEVYQDKIIQKLYICFMENIFTDEYFMKKALQEAETAFQQGEIPVGAVIVIDNRIIARSHNLTEMLNDVTAHAEMQAITASANFLGGKYLKDCTLYVTLEPCQMCAGALYWSQISKIVYGATDEQRGYRAMGAQLHPKTKVISGIMQNECTHLMKDFFKQRRSKSTKD

SEQ ID NO: 138 - protein, 178 aa, Artificial Sequence
  Description of artificial sequence: pYY-BEM4.28; tr|K1KX30|K1KX30_9BACT polypeptide sequence
MVKNPVNNNELYFGKHSEIPMNEEQKAYMKMAVDLSRSGMESGKGGPFGCVIVKDGKVIGIGSNSVLETNDPTAHAEIVAIRDACRNLGHFQLDGCEVYTSCEPCPMCLGAIYWARPSKVFFANDKRDAAEAGFDDDFIYQELELPYEKRKIPFEQGMQDTAKEVFQEWILKEDKTLY

SEQ ID NO: 139 - protein, 196 aa, Artificial Sequence
  Description of artificial sequence: pYY-BEM4.29; tr|R4XI84|R4XI84_TAPDE polypeptide sequence
MSSEIEPPSTDVHKHAVAEAADESGAADAFMQIALQQAETALLNKEVPVGCVFVHQPTGTVLATGANQTNASLNGTLHAEFVAIESILRDHPPSIFRESDLYVTVEPCVMCASALRQLQVRKVYFGCGNDRFGGCGSVFSIHSDASKTGDAAYMVESGIFRKEAIMLLRRFYLLQNESAPKPALKSTRVLKEHFDE

SEQ ID NO: 140 - protein, 212 aa, Artificial Sequence
  Description of artificial sequence: pYY-BEM4.30; tr|A0A239CVF7|A0A239CVF7_9DELT polypeptide sequence
MSPASKKHFPSLFSFLLLTIGLICGTAHAQPQGHTADDTAATLANASLKEHEPFIRRCYQLAIDAGKKGNHPFGALLVHKGKIVLEAENTVLTDNDFTNHAEMNLIAEAARTLSRQIIPEATVYTSCAPCAMCTATLAMAGFTRIVYGVSHDALNKRFGLKGKSVSCPALFKTMGMELEFVGPVLEKEGLRVFDFWPEKDPHAQMLKKQARK

SEQ ID NO: 141 - protein, 320 aa, Artificial Sequence
  Description of artificial sequence: pYY-BEM4.31; tr|A0A1Q3NME1|A0A1Q3NME1_9BACT polypeptide sequence
MTEFNYDWAKLAFSSKRPLTNLKATFIIAPREISEKRFTQLLKEYLPKGDILLGISKEDYVEGLEGQPQFAMLQQKTLQKLIDKVNDASAHKVYTLRYFQRELPAIIEKLTPPRVVGIHGSWHHSFHTLPIYYLLSEKRIPYQLVAAFSDEDEARAYEVATDKKIVRPTLEGSFDDTTVLQLTDEVAKSSYDYGFQTGAILAEKVNGVYQPVAAGFNKVVPYQTYALLNGASRETNFSPANDMNHYDTIHAEMQILVEAAKQGISLKDKTLFVNLMPCPSCARTLSQTELSEIVYRIDHSGGYAVDLLTKVGKDIRRIVY

SEQ ID NO: 142 - protein, 180 aa, Artificial Sequence
  Description of artificial sequence: pYY-BEM4.32; tr|A0A2G6N4N7|A0A2G6N4N7_9DELT polypeptide sequence
MKERTVSYSDRHFMAEALEMAESALTQGEFPVGCVIADGTAVVARGHRTGTTAGAVNEIDHAEINALRHLGLAGEHLDRTDLTIYSTMEPCLMCFAAIVLSGINRIVYAYEDVMGGGTGCDLTGLPPLYRDAPLTLVAGVRRRASLNLFRRFFTDPENGYWAGSLLSRYTLNQTKDSHRL

SEQ ID NO: 143 - protein, 156 aa, Artificial Sequence
  Description of artificial sequence: pYY-BEM4.33; tr|A0A0G0RBB8|A0A0G0RBB8_9BACT polypeptide sequence
MQSVQYNKLTHLQRRALDEAEQVLENSYNPYSHFYVGACLISEDEQLIAGTNFENAAYGSAICAERAAVLRANAMSIRRFRGIAIIARGEDFNTTEVTGPCGSCRQVLYEISQVSGCDLQVILATSKKDKIVITTIRELLPLAFGPLDLGVDIGKY

SEQ ID NO: 144 - protein, 217 aa, Artificial Sequence
  Description of artificial sequence: pYY-BEM4.34; tr|A0A327L2Q5|A0A327L2Q5_9RHIZ polypeptide sequence
MVTSRDGEDEAMMARCVALSRIAVGKGEYPFGAVVAREGRIVAEAINRTIRDGDVSRHAEVIALARAQKAIGRRELRECSLYSNVEPCAMCSYCIREAWVGRVVYALGSPVMGGVSKWNILRDDGLSGRMPQVFDAAPEVVSGVLVEQAQAAWRDWSPLAWEMITLRGLMTDPSARPECRTRAARPRSLWHHLVALIERPPRPYVDPTSAAEGHADL

SEQ ID NO: 145 - protein, 162 aa, Artificial Sequence
  Description of artificial sequence: pYY-BEM4.35; tr|S2DR30|S2DR30_9BACT polypeptide sequence
MKMKKKIEITVSLEVIQKSEWSKEDRSLIERAIHAVEHAHAPYSNFMVGTALLLDNGQIFSANNQENVSFPVGICAERAVLSYAMGNFPNNRPVKLAVVAKRRSDSTWATVTPCGLCRQTINEYEVKFGHPIEILMLNPGEEILKASGIDQLLPFRFNDLNS

SEQ ID NO: 146 - protein, 153 aa, Artificial Sequence
  Description of artificial sequence: pYY-BEM4.36; tr|A0A369QGF1|A0A369QGF1_9BACT polypeptide sequence
MEEHEKWMHWCLNLAQQALQQGDFPVGAVVVQKGKLIGQGVEAGQLKKDITCHAEMEAIRDARQTINTADLQNCILYSTHEPCIMCSYVIRHHKISRVVVGTTVPEVGGSSSAYPLLSAPDISIWVAPPHLVTGVLAEACQALSQAYKQKFKK

SEQ ID NO: 147 - protein, 159 aa, Artificial Sequence
  Description of artificial sequence: pYY-BEM4.37; tr|A0A1W6X4U4|A0A1W6X4U4_9RHIZ polypeptide sequence
MTNPSRQERWDRRFLELAKVFGTWSKDRSAGTGCVIVGPDRLLRASGYNGFARGIDDEVPERHERPAKYSWTEHAERNAIYNAAKLGISLDGCTAYVNWFPCIDCARAIVQAGIVRLVGLHPDHADQRWGSEFKFATEMLRESGIEIILYDIPELAARK

SEQ ID NO: 148 - protein, 490 aa, Artificial Sequence
  Description of artificial sequence: pYY-BEM4.38; tr|A0A238BW09|A0A238BW09_9BILA polypeptide sequence
MEEMARKIRTKAKKANSYCNTMTFLISKASIVLLKAECKRIELTVVIFRFLIKMNASEPNNELCDMTVIKSMLKITHVIFDLDGLLIDTEVVFSKVNQCLLSKYNKKFTPHLRGLVTGMPKKAAVTYILEHEKLSAKVDVDEYCKKYDEMAEEMLPKCSLMPGVMKLVRHLKTHSIPMAICTGATKKEFEIKTRYHKELLDLISLRVLSGDDPAVKRGKPAPDPFLVTMDRFKQKPEKAENVLVFEDAANGVCAAIAAGMNVIMVPDLTYMKIPEGLQNKINSFSDNLIISNDLNVALMSLKKELSEEEVHFLNRAFEIAVDAVLNNEVPVGCVFVFEGQEVAFGRNDVNRTKNPTYHAEMVALKMMKQWCMDNGRDLEEIMRRTTLYVTLEPCIMCASALYHLRLKKILYGAANERFGGLVSVGTREKYGAKHFIEIMPNLSVDRAVKLLKEFYEKQNPFCPEEKRKVKKPKKSGNNNDNSDDAVALNV

SEQ ID NO: 149 - protein, 159 aa, Artificial Sequence
  Description of artificial sequence: pYY-BEM4.39; tr|A0A1J5H6Z0|A0A1J5H6Z0_9BACT polypeptide sequence
MAYQPSEKFMQMAIDKTREGVLSGQTPFGACIVKDGKVVACEHNTVWQDTDITSHGEVHTIRAACKAIGSIDLSGCILYSTCEPCPMCFSAIHWARIDTVVYGAFIADAQDAGFNELTISNEKMKEFGGSPVNFISGFMRDENVALFKLWKEQGANNVY

SEQ ID NO: 150 - protein, 168 aa, Artificial Sequence
  Description of artificial sequence: pYY-BEM4.40; tr|A0A3C2D945|A0A3C2D945_9BACT polypeptide sequence
MKTTEIRIIVHEYQNIDELTENDQYLLHEARRITEFAYAPYSGFHVGAAILLGNGMIVKGNNQENSAYPSGLCAERVALFYANANYPDSEVKTIAISAAKNGILVNDPIKPCGGCRQTLSEAEVRFGSPIRIILDGQDSILVLHGVESLLPLSFSKKDLASPLAATGR

SEQ ID NO: 151 - protein, 214 aa, Artificial Sequence
  Description of artificial sequence: pYY-BEM4.41; tr|A0A1I7EYS3|A0A1I7EYS3_9BURK polypeptide sequence
MKFKLDPSRPPDEDDYYLGVALAVRRKANCTGNRVAAVIVKNKRVIATGYNGVPEDMPNCLDGGCLRCSNPGGQFKSGTRYDLCICVHAEQNALLTAARFGISVEGAHLYTTMQPCFGCAKEILQAKIEKVFYLHPWVPTDVDPVMDAAMKAEYAKIIGKLKVKKLDFDDPVATWAVTTMRQAALASDKNPDKKTPPKTAKKKVAKKKSRTSPR

SEQ ID NO: 152 - protein, 155 aa, Artificial Sequence
  Description of artificial sequence: pYY-BEM4.42; tr|H8GQX8|H8GQX8_METAL polypeptide sequence
MNHEHFMRRAIELARQAPQYPFGAVIVRRDDGQCVGQGFNRSDLNPTYHGEMVAINDCAVRHCAEDWRGFDLYTTAEPCAMCQGAIEWAGIGRVFYGTSIPYLQKLGWWQIDLRAAEVSARAVFRDTLIVGGILETECNALFAAARRGCFGTGSE

SEQ ID NO: 153 - protein, 156 aa, Artificial Sequence
  Description of artificial sequence: pYY-BEM4.43; tr|A0A0S8HZN3|A0A0S8HZN3_9CHLR polypeptide sequence
MDEHDIRFLRASFDVARNARKNGNHPFGALLVDEHGRIVMEAENTVITAKDCTGHAETNLMREASSKYDSDFLANCTIYTSTEPCPMCAGAIFWSNVRRVVYGLSEESLYEIAGRGSEEVLFLSCREIFERGKKLIEVIGPLLEDEAREVHMGFWR

SEQ ID NO: 154 - protein, 193 aa, Artificial Sequence
  Description of artificial sequence: pYY-BEM4.44; tr|E3SF31|E3SF31_9CAUD polypeptide sequence
MKPTTVLQIAYLVSQESKCCSWKVGAVIEKNGRIISTGYNGSPAGGVNCCEHAEEQGWLLNKPKPVLIPGHKSECVRFSQVDRFVLAKAHREAHSAWSKNNEIHAELNAILFAARMGSSIEGATMYVTLSPCPDCAKAISQSGIKKLVYCETYDKNIPGWDDILKNAGIEVFNVPKRSLDKLNWENINEFCGE

SEQ ID NO: 155 - protein, 330 aa, Artificial Sequence
  Description of artificial sequence: pYY-BEM4.45; tr|F8AAC6|F8AAC6_THEID polypeptide sequence
MIRAPWHEYFMLLAKIVALRSGCNSRPSGAVIVKNKRILATGYNGPMPGAWHCTDRGPGYCFRREKGIPDIDKYNFCRATHAEANAIAQAARFGISVEGASLYCTLAPCYVCLKLIASAGIKKVYYEHDYGSRDFERDQFWKEAIKEAGLEKFEQITVSQEVMEQLQEILPYPTSKRRLAPTEFLDEFEDGKKYGVPSIEVLFNKLNYLTRQALKDITFVIEKTTVTEEPEGISFYLSGKMVELSELINTVKKQINADQNFYFLAKHNAIEAKIEILREAENIRLKAFLNECPLESFKRIAESLDYILYQVSNSLSLPTRLELSVNLLRI

SEQ ID NO: 156 - protein, 158 aa, Artificial Sequence
  Description of artificial sequence: pYY-BEM4.46; tr|A0A2H4ZNK4|A0A2H4ZNK4_9EUKA polypeptide sequence
MKKQLSRKIQEEWMSRLLRNAYDAGTYGEVPIAAVILNESGQCIGWGRNCREKDQNPLGHAEIIALRQASYLKKSWRFNECTMLVTLEPCPMCAGALLQARINHIIYGASDYKRGGFGGVLDLSKNSSAHHKIEITRGVKSIQSCQLLETWFRRRRRV

SEQ ID NO: 157 - protein, 176 aa, Artificial Sequence
  Description of artificial sequence: pYY-BEM4.47; tr|A0A239N5N1|A0A239N5N1_9PSED polypeptide sequence
MEGRAGIIPFDEGGAAMGPAEEDSPMQHLAYMREALALARANVEAGGRPFGAVLVRDGEVIARAANGTHLDHDPTAHAELLALRAAGRALGSPRLDGCVVYASGHPCPMCLAAMHLSGVSAAYYAYSNADGEPYGLSTAAVYAQMAQPVEWQSLPLQALRPEDEEGLYGFWRERRP

SEQ ID NO: 158 - protein, 199 aa, Artificial Sequence
  Description of artificial sequence: pYY-BEM4.48; tr|A0A328VTR2|A0A328VTR2_9PSED polypeptide sequence
MHPEHLALLQQAPASTHADDTWARLCCEQALLAVEEGCYAVGALLVDGAGELLCSGRNQVFAPAYASAAHAEMRVLDQLEAEHAQVDRRSLTLYVSLEPCLMCYGRILLAGITRVRYLARDRDGGFALRHGRLPPAWANLASGLSVVQAKADPYWLDLAEHAIGRLQDRQTLRQRVIRAWRGQRTLTDEFSSTKRTHSG

SEQ ID NO: 159 - protein, 402 aa, Artificial Sequence
  Description of artificial sequence: pYY-BEM4.49; tr|A0A103YG48|A0A103YG48_CYNCS polypeptide sequence
YIRELHASSLRRDEHEIQNPKILVIVDRLSSPSLHVSLSLSLSLVIFPPFIPLNQTPTHMENAKVVEAKDGTIAVASAFSGHQEVVQDRDHKFLTRAVEEAYKGVECGDGGPFGAVVVHKDEVVASCHNMVLKHTDPTAHAEVTAIREACKKLNKIELSDCEIYASCEPCPMCFGAIHLSRIKRLIYGAKAEAAIAIGFDDFIADALRGTGFYQKAHLEIKQADGNGAMIAEQVFEKTKAKFAIDHKFLTRAVEEAYKGVECGDGRPFGALVVHKDEVVVSCHNMVLNYTDPTAHAEITAIREACKKLNRIELSDCEMYSSCEPCPMCFGAIQISRIKRLVYGAKAEASIASGIPIGDFISDALKGTGFHEKANFEIKQADGNGAMIAEQVFERTKAMFPKR

SEQ ID NO: 160 - protein, 195 aa, Artificial Sequence
  Description of artificial sequence: pYY-BEM4.50; tr|W5M1M8|W5M1M8_LEPOC polypeptide sequence
NSSTRESRVMAQMEINGGASPPKKPGKGQSAADQDMITGLINKALQAKEFAYCPYSNFRVGAALMTNDGRVFTGCNVENACYNLGVCAERTAILKAVSEGYESFRAIAVSSDLQDQFISPCGACRQVMREFGTGWDVFLTKVDGSYVRMTVDELLPMSFGPDDLKKKKVFSLQNGHEVSTQFYTHSPCEAGENNN

SEQ ID NO: 161 - protein, 134 aa, Artificial Sequence
  Description of artificial sequence: pYY-BEM4.51; tr|A0A3N5YPZ2|A0A3N5YPZ2_9ALTE polypeptide sequence
MSNSETEHIQALVDAAQAAQKQSYSPYSSFQVGAAIFADDGNTYSGCNIENVAYPLGQCAEATAIGMMIMQGAKRIEDIMIASPNDQVCPPCGGCRQKISEFGTAETKIHMVTRSGEVSTVTLGELLPLAFDSL

SEQ ID NO: 162 - protein, 162 aa, Artificial Sequence
  Description of artificial sequence: pYY-BEM4.52; tr|A0A2A9NC86|A0A2A9NC86_9AGAR polypeptide sequence
MTNSTLSNEDRTRLIQGAFQARKKTYSPYSNFPVGAALLTTDGRIIEGANIENASYGGTICAERTAIVKAVSDGYRHFAGIAVTTKMPTRVSPCGICRQVLREFCSLDMPVLLVPGDYPQRNPVDDDGADKPGVITEGGVRETTLGALLPDSFGPENLPPRA

SEQ ID NO: 163 - protein, 163 aa, Artificial Sequence
  Description of artificial sequence: pYY-BEM4.53; tr|A0A2D6RD43|A0A2D6RD43_9GAMM polypeptide sequence
MNIENLITENDETLIRRCIELAGESVKNGDKPFGALLAKDGNIIFESSNNAKTKVPYHAEILTLMDAQDKLNTTDLSDYALYSNCEPCPMCSFMIREYKLDKVVFSVHSPYMGGQSRWNILEDDVLTRFKPYFSKPPNVVGGVLESEGKRIFDKVGLWMFGKE

SEQ ID NO: 164 - protein, 204 aa, Artificial Sequence
  Description of artificial sequence: pYY-BEM4.54; tr|A0A0H3AVL6|A0A0H3AVL6_BRUO2 polypeptide sequence
MHAKGYSQQERRIIPFANRFRFRELCSNKSLHGLRAKFPEQYTKWDPMRKAASITKANSATPMDIALEEAHAAGERGEVPIGAVIVRDGEIIARAGNRTREFNDVTAHAEILTIRQAGEMLGSERLIDCDLYVTLEPCAMCAAAISFARIRRLYYGASDPKGGGIEHGGRFYTQPTCHHAPEIYPGFCEADARKILKDFFREKR

SEQ ID NO: 165 - protein, 165 aa, Artificial Sequence
  Description of artificial sequence: pYY-BEM4.55; tr|A0A242H531|A0A242H531_9ENTE polypeptide sequence
MFIVKNNIEVIQQQAELDAKFMKQALKLAKDASNNGNEPFGAVLVKNDKVILTGENQIHTESDPTYHAELGIIRDFCTSQKITDLSEYTLYTSCEPCCMCAGAMVWSNLDRMVYGLGHDELAEIAGFNIMIGSEEIFSKSPNRPEVAKGVLKEAAVPVYVDYFQR

SEQ ID NO: 166 - protein, 181 aa, Artificial Sequence
  Description of artificial sequence: pYY-BEM4.56; tr|A0A2R6XZE2|A0A2R6XZE2_9BACL polypeptide sequence
MSGRISWHEYFMAQAKLIALRATCTRLMVGAVIVRDRRVIAGGYNGSIAGDEHCIDVGCKVRDGHCIRTIHAEQNALMQCAKFGVSTDGAELYVTHFPCLNCTKLLIQAGIRHIYYEVPYRVDPYAIELLEKAGVGTTQITVDLNAYVQVMSKVSTDPALTYVPESKAQKDEYGQSVGKIV

SEQ ID NO: 167 - protein, 173 aa, Artificial Sequence
  Description of artificial sequence: pYY-BEM4.57; tr|A0A139SHT6|A0A139SHT6_9BACT polypeptide sequence
MSEANASSESLPSRNSPVELIAEAAGKFGRRPTWDEYFMATAVLISTRSSCERLNVGCVIVTAGESHKNRIVAAGYNGHLPGSPHTSRMRDGHEQATVHAEQNAISDAARRGSSVEGCTAYVTHYPCINCAKILASAGIAKICYRLDYHNDPLVKPMLAEAGIEIVQLGEAAS

SEQ ID NO: 168 - protein, 170 aa, Artificial Sequence
  Description of artificial sequence: pYY-BEM4.58; tr|A0A261DBH2|A0A261DBH2_9RICK polypeptide sequence
MVMKKKLITVKRSTEFNNFFMEEALKQAQFALDKNEIPVGAIIVNRITNKVIAKAHNIVEQTKNPVLHAEIVAINQSCQILSSKNLSDCDMYVTLEPCVMCSGAISFARIGRLFYAANDPKQGAIENGGRFFNSKSCFYRPEIYSGFSAKISENLIKEFFYNVRYQKCNP

SEQ ID NO: 169 - protein, 146 aa, Artificial Sequence
  Description of artificial sequence: pYY-BEM4.59; tr|A0A2N0XZK6|A0A2N0XZK6_9VIBR polypeptide sequence
MTDNSLHESYMRQAFELSKSALPGCRPNPPVGCVFVKDGEVVSSGFSQPPGNHHAEAGAIAAYTGSYDGLVAYVTLEPCSFQGRTPSCAKALVRVRPEKVYVAILDPDTRNSGAGIKILEDAGIDVEVGLLGEEVASFLNPYLIRN

SEQ ID NO: 170 - protein, 159 aa, Artificial Sequence
  Description of artificial sequence: pYY-BEM4.60; tr|A0A1V5R0F9|A0A1V5R0F9_9BACT polypeptide sequence
MTKKETTKLHALDDFCMKKALLLAKRAFRADEVPVGALVVDSSNKVIGRGYNQVEKRKSQRAHAEQLAIEQACKKIGDWRLEGCTLYVTLEPCTMCMGLIKLSRIERVVFGAASPLFGYQLDKNRKSQLYKKGVIKIRKGVGKATAAALLKDFFKNKRM

SEQ ID NO: 171 - protein, 167 aa, Artificial Sequence
  Description of artificial sequence: pYY-BEM4.61; tr|A0A2W0H8Y3|A0A2W0H8Y3_9BACI polypeptide sequence
MKNNGRLDHEYFMTEALQEAKEAGQRGDLPIGAVIVHNGRIIARGSNMRKTAGIKISHAENNAMHNCAPYLMKHASECVIYTTLEPCIMCLTTLVMANIDSIVFAADDKYMNMKPFIDANSYIRDRIHQYKGGVCRGESEALLRKYSPYAAELALNGTHPHHRKGGA

SEQ ID NO: 172 - protein, 165 aa, Artificial Sequence
  Description of artificial sequence: pYY-BEM4.62; tr|A0A261BDB7|A0A261BDB7_CAERE polypeptide sequence
LYKLYIFRMTTTKANLTQFEQELVDKAVGAMEKAYCKYSGFKVGAALVCEDGEIIIGANHENASYGATICAERSAMVTALTKGHRKFKLLAVATELEAPCSPCGICRQYLIEFGDYKVILGSSTSDQIIETTTYGLLPYAFTPKSLDDHEKEAEERNHQEGEKKH

SEQ ID NO: 173 - protein, 162 aa, Artificial Sequence
  Description of artificial sequence: pYY-BEM4.63; tr|A0A2E1PHI6|A0A2E1PHI6_9GAMM polypeptide sequence
MKELLIHSWLMLNSNSKLIMERVIELSEINLKNGKIPIAAVIVDKKNYEIISESQNEDSPIGHAELLAITKALKKLNTNRLDSTNLFVTIEPCPMCAYAISKCHINRLYFGSEDEKGGGVINGPRIFESHNLKKIDYVSHCYHEKTTQLMQSFFQLKRNQQL

SEQ ID NO: 174 - protein, 133 aa, Artificial Sequence
  Description of artificial sequence: pYY-BEM4.64; tr|A0A378LUA7|A0A378LUA7_9GAMM polypeptide sequence
MDTIIKKMISNAHNTLAHSYSPYSKFSVASCICTDKDNFYTGVNVENSAYGLAICAETSAISAMVTAGEKRIKSMVVMAGTNILCSPCGACRQRIYEFSTPDTLIHLCDKNSILRTFKINELLPEAFKFDFNP

SEQ ID NO: 175 - protein, 370 aa, Artificial Sequence
  Description of artificial sequence: pYY-BEM4.65; tr|A0A139HQ78|A0A139HQ78_9PEZI polypeptide sequence
MADSLKSKPGHARHDTALIHGLSQSDVQKLSESCVDAKSKAYCPYSHFRVGCAVLLANGDVVQGANVENAAYPVGTCAERVALGTAVGAKKGDFRALAVSTDISPPASPCGMCRQFIREFCELNTPILMYDKDGKSVVMTLEQLLPMSFGPDKLLPPGQLENGLMQTQTQSSFVTRAFSTTSSRRQDDTPQVPQSHYDFFPQTFPQGPPPKTSFSPDLKQLRKEFLQLQAKAHPDLAPQDQKRRAEALSMRINEAYKTLQSPLRRAQYLLSQQGIDVEDETAKLDDSSLLMEVMEAREAVEEVEDEEQLNEIRAENNGRIEESVRVLEDAFRDNEFEKAAQEAIRLRYWVNIEESIQGWEKGNGGGILHH

SEQ ID NO: 176 - protein, 165 aa, Artificial Sequence
  Description of artificial sequence: pYY-BEM4.66; tr|A0A2A9FXV0|A0A2A9FXV0_9VIBR polypeptide sequence
MCNLKENKDMDKYFHFACDATIEGMREGTGGPFGATLTRNGEVVCSVANTVLKDMDISGHAEMVAVREACKKLDTLDLSDCVMYATCEPCPMCVSVMLWAGIKTCYYASTHLDAAKHGFSDQQLRDYLDGSDTSTLNMVHIEDNRDDCAKIWTEFRHLNETKNDG

SEQ ID NO: 177 - protein, 509 aa, Artificial Sequence
  Description of artificial sequence: pYY-BEM4.67; tr|A0A1A8AG96|A0A1A8AG96_NOTFU polypeptide sequence
MEHSDRWSRAEPGLSTSSRETRDGSTQTDCKLQGHGPRLSKVNLFTLLSLWMELFPQEQDEENGQSQIRRSGLVVVREGKVVGLHCSGADLHAGQAAILQHGASLANCQLFFSRRPCATCLKMIINAGVRQITFWPGDPEISMLTSNQTHSQRTSQSITEASLDATAVEKLKSNSRPQICVLMQPLAPGVLQFVDETSRRSDFMERMMDDDPELDSEKLFNSDRLRHLKDFCRHFLIQTDQRHKDILSQMGLKNFCVEPYFSNLRSNMTELVEVLAAVAAGMPQQHYGFYREESLSLDPHPVDVSQAVARHCIVQARLLSYRTEDPKVGVGAVIWAKGQSACCCGTGRLYLIGCGYNAYPAGSKYAEYPQMDNKQEDRERRKYRYIVHAEQNALTFRTRDIKPDECSMLFVTKCPCDECIPLIRGAGVKHIYTSDQDRDKDKGDISYLRFGSLKGVCKFIWQRSPPVSSASSLHLTNGCVGKHVRQAEQQIYKNKKLCTKGSSGSSDIC

SEQ ID NO: 178 - protein, 148 aa, Artificial Sequence
  Description of artificial sequence: pYY-BEM4.68; tr|A0A3E2VN88|A0A3E2VN88_9FIRM polypeptide sequence
MEKEITNMDKQKLIQMAVDGLGRSYAPYSHFHVSAALLCADGTVYTGNNIENAAYTPSVCAERCAIFKAVGDGRREFEAIAVCGGPDGVIEDYCPPCGVCRQVMREFCDPSSFRVLVAKTAEDYREYTLEQLLPDGFGPDHLTGSGER

SEQ ID NO: 179 - protein, 221 aa, Artificial Sequence
  Description of artificial sequence: pYY-BEM4.69; tr|A0A2D5ZRJ2|A0A2D5ZRJ2_9BACT polypeptide sequence
MARPVHLHTGERRTEEGATESRAVAAVATAITRAPRAPPRPATGRERDGPPPRRVFGGGLRVGDPSGYDRGESKPIGGPLTEKRSDWHSYFMRIAGEVATRATCDRKHVGAVIVRNRTILSTGYNGSIRGMPHCDDVGHDMVDGHCIATIHAEANAILQAARNGVMIQDGSIYITASPCWNCFKLVANAGLKRVYYGEFYRDKRSFEVARRLGIDLMHIEV

SEQ ID NO: 180 - protein, 155 aa, Artificial Sequence
  Description of artificial sequence: pYY-BEM4.70; tr|A0A1B8WPS3|A0A1B8WPS3_9BACI polypeptide sequence
MEGVQLIYQFQWGNLIMTVNKEDLYLIDVARNTIKTLYVDGKHHVGAAVRTKTGKIYSAVHLEANIGRVSVCAEAIALGKAISEGESEFDTIVAVRHPDPTQENQKIEVVSPCGICRELISDYGKGTNVILKNKEGYIKTVISDLLPNKYIREDN

SEQ ID NO: 181 - protein, 156 aa, Artificial Sequence
  Description of artificial sequence: pYY-BEM4.71; tr|A0A1W5ZQK9|A0A1W5ZQK9_9BACI polypeptide sequence
MNRFMERAVSLAAENVRVGGQPFGAVLVKDDELVAEGVNEMHLNYDVSGHAELLAIRRAQGELQTHDLSGYTMYASGEPCPMCLSAMYFAGIKDVFYCATVEEAAQVGLEKSKNVYDDLQKSKGERSLVMKQMPLEDDQEDPMKLWDERTNHNGTS

SEQ ID NO: 182 - protein, 340 aa, Artificial Sequence
  Description of artificial sequence: pYY-BEM4.72; tr|A0A378V0W4|A0A378V0W4_MYCFO polypeptide sequence
MVHAQFDPTARQALAATAVEAKTRKDLTWQQIADAAELSPAFVTAAVLGQHALPARSAEAVAALLGLDDDAALLLQTIPIRGSIPGGIPTDPTIYRFYEMLQVYGTTLKALVHEQFGDGIISAINFKLDVRKVADPEGGERAVITLDGKYLPPNPFDRVRYRGGLMDFAQRTIDIARQNVAEGGRPFATVIVKNGEILAESPNLVAQTHDPTAHAEILAIRKACTRIGTEHLIGATIYVLAQPCPMCLGSLYYCSPDEVVFLTTRDAYEPHYVDDRKYFELNMFYDEFAKPWDQRRLPMRYEPRDAAVDVYKLWQERNGGERRVPGAPTSTRPGKNPRGE

SEQ ID NO: 183 - protein, 157 aa, Artificial Sequence
  Description of artificial sequence: pYY-BEM4.73; tr|I3XF03|I3XF03_RHIFR polypeptide sequence
MKQRCMSPKSAQRFWDNDMHNNKDRPMSENELFVAAREAMAKAHAPYSKFPVGAAIRAEDGQIYTGANIENLSFPEGWCAETTAISHMVMAGQRKIMEVAVIAEKLALCPPCGGCRQRLAEFSGASTRIYLCDETGIKKSLALSDLLPHSFETEILG

SEQ ID NO: 184 - protein, 595 aa, Artificial Sequence
  Description of artificial sequence: pYY-BEM4.74; tr|F8IEF3|F8IEF3_ALIAT polypeptide sequence
MDAKELETRGWLCMRAVDVIDKKRRGEALAEEELRFLIEGYVAGRIPDYQMSAFLMAVVWRGMTREETLVLTRLLADSGERLDLSGIPGVKVDKHSTGGVGDKATLVVLPLVASIGVPVIKMSGRGLGHTGGTIDKLESIPGFRTDLSVAELVAQVRQVGIALGGQTADLAPADKKLYALRDVTGTVESLPLIASSVMSKKLAGGADAIVLDVKVGDGAFMKSRSDARRLARLMVEIGEAAGRRTVAVLSNMDQPLGCAIGNALEVAEAIRVLSGEGPFDLAEIALALAEEMTVLAGVAATREEARRMLRQSVAEGRALETLRRWIAAQGGDPAVVDDPSRLPQAPVQMPYLPKKAGFVAKLSALAFGLAAMRLGAGRETKEEAIDPSVGIVLHAKVGDRVQTHRPMFTVHARTGEDALRCIQELEAAIQISDDPVEAPPLILARIDRSEALPYADLMDAAREARDRAYVPYSGFAVGAALELADGRMVTGANVENASYGLTNCAERSAVFRAVAEGGPGTKPEIRAVAVIADSPEPVSPCGACRQVLAEFCSPDTPVYLGNLQGDVRETTVGALLPGAFTDAQMANVRRQDKEA

SEQ ID NO: 185 - protein, 153 aa, Artificial Sequence
  Description of artificial sequence: pYY-BEM4.75; tr|A0A1G3M638|A0A1G3M638_9SPIR polypeptide sequence
MKTTNINALDKWDLRFLQMAEHVAEWSKDPSTKVGAVIVRPDRTIASVGFNGFARGVRDTVERLWNRELKYPLTVHAELNAILSAHEPVRGHSLYVSPLSPCSNCAGVIIQSGIARVVAKCGQVNNPAQWSESFNLALTAFAEAGVSVILVEH

SEQ ID NO: 186 - protein, 177 aa, Artificial Sequence
  Description of artificial sequence: pYY-BEM4.76; tr|A0A3D9LFR2|A0A3D9LFR2_9MICC polypeptide sequence
MEQNDHGSSGAFSDPFEDDIPLTASLPRITGTGSGIDWQRLESTARAAMTRAYVPYSRFPVGAAALVEDGRVVAGCNIENASLGLTLCAECSLVSNLQMSGGGRIVAFYCVDGNGEVLMPCGRCRQLLYEFHAPGMRLMGPDGELTMDEVLPLAFGPADMTHLSDSAASTDDPGRTR

SEQ ID NO: 187 - protein, 172 aa, Artificial Sequence
  Description of artificial sequence: pYY-BEM4.77; tr|A0A3B9YGB5|A0A3B9YGB5_9BACT polypeptide sequence
MAKPISKKYRKLIETAKAARKKAYSPYSRYQVGAAVLTESGRIYSGANMENASYGLCMCAERVAIANAVTRGEKVLQAVCVVGKKARPCGACRQVMLEFSTKETELLMVDIDPNARRDTVIRTRVYSMLPNPFDPFESGMLPQHPQNLLRRRKSPQPRRKRRSRPVHREVSR

SEQ ID NO: 188 - protein, 391 aa, Artificial Sequence
  Description of artificial sequence: pYY-BEM4.78; tr|A0A182F569|A0A182F569_ANOAL polypeptide sequence
MPRPSQFRVSSSQSLSNSQIQASQSSDSVVDITSYVNAVVKALLNLSCTKTIIKRADLVNIALKGNGRLIGRVLQDANIELKEIYGYELIEVEKSKTMILCSTLAAGSMDELNDANRRRYTFLYLILGYIFMKNGSVPETIVWEFLETLGIEEQQEHNYFGDVRKLYDSLFKQAYLTRTKQALEGLNDDVMLISWGVRSKHEVSKKDILAGFCKVMNRDPVDFKAQYIEANEKDDKMNNNINGTVDGRNTVEYSSLDASVKELIEAAIKVRNNAYCPYSNFAVGAALRTVGGDIVTGCNVENGTFGPSVCAERTAVCKAVSEGHREFTAVAVVAFQETEFTAPCGTCRQTLSEFSRKDIPIYLVKPSPVRVMVTSLFQLLPHAFSPSFLNK

SEQ ID NO: 189 - protein, 151 aa, Artificial Sequence
  Description of artificial sequence: pYY-BEM4.79; tr|A0A264Z0D4|A0A264Z0D4_9BACI polypeptide sequence
MEPKKLIEEAIVASKQAYVQYSNFHVGAALLTKDGKLYHGCNIENASYGLTNCAERTAIFKAVSEGEKEFQAIAVVGDTEGPISPCGACRQVLAEFFSPDTVVILANLKGDHVVTNINELLPGFFSSKDLQKKVKNCFEKNALGSSCLRPI

SEQ ID NO: 190 - protein, 229 aa, Artificial Sequence
  Description of artificial sequence: pYY-BEM4.80; tr|A0A1L9Q1R3|A0A1L9Q1R3_ASPVE polypeptide sequence
MPLSAEEAALVETATATINSIPLSEDYSVASAAKASDGRVFTGVNVYHFTGGPCAELVVLGVAAAAGAAQLTHIVAVANEQRGILSPCGRCRQVLLDLQPNIQVIVGKEGSEQSVPVAQLLPFSYRQPDQHTPVIFKALTSSGPVVVDFFATWCGPCKAVAPVVGKLSETYTDVRFIQVDVDKARSISQEHDIRAMPTFVLYKDGKLLDKRVVGGNMKELEEQIKAIIA

SEQ ID NO: 191 - protein, 18 aa, Artificial Sequence
  Description of artificial sequence: synthetic peptide
KRTADGSEFESPKKKRKV

SEQ ID NO: 192 - protein, 16 aa, Artificial Sequence
  Description of artificial sequence: synthetic peptide
KRPAATKKAGQAKKKK

SEQ ID NO: 193 - protein, 17 aa, Artificial Sequence
  Description of artificial sequence: synthetic peptide
KKTELQTTNAENKTKKL

SEQ ID NO: 194 - protein, 19 aa, Artificial Sequence
  Description of artificial sequence: synthetic peptide
KRGINDRNFWRGENGRKTR

SEQ ID NO: 195 - protein, 16 aa, Artificial Sequence
  Description of artificial sequence: synthetic peptide
RKSGKIAAIVVKRPRK

SEQ ID NO: 196 - protein, 7 aa, Artificial Sequence
  Description of artificial sequence: synthetic peptide
PKKKRKV

SEQ ID NO: 197 - protein, 30 aa, Artificial Sequence
  Description of artificial sequence: synthetic polypeptide
MDSLLMNRRKFLYQFKNVRWAKGRRETYLC

SEQ ID NO: 198 - protein, 1368 aa, Streptococcus pyogenes [sequence omitted]

SEQ ID NO: 199 - DNA, 4104 bp, Streptococcus pyogenes
  misc_feature (1)..(4104): wild type spCas9 polynucleotide sequence
atggataagaaatactcaataggcttagatatcggcacaaatagcgtcggatgggcggtgatcactgatgattataaggttccgtctaaaaagttcaaggttctgggaaatacagaccgccacagtatcaaaaaaaatcttataggggctcttttatttggcagtggagagacagcggaagcgactcgtctcaaacggacagctcgtagaaggtatacacgtcggaagaatcgtatttgttatctacaggagattttttcaaatgagatggcgaaagtagatgatagtttctttcatcgacttgaagagtcttttttggtggaagaagacaagaagcatgaacgtcatcctatttttggaaatatagtagatgaagttgcttatcatgagaaatatccaactatctatcatctgcgaaaaaaattggcagattctactgataaagcggatttgcgcttaatctatttggccttagcgcatatgattaagtttcgtggtcattttttgattgagggagatttaaatcctgataatagtgatgtggacaaactatttatccagttggtacaaatctacaatcaattatttgaagaaaaccctattaacgcaagtagagtagatgctaaagcgattctttctgcacgattgagtaaatcaagacgattagaaaatctcattgctcagctccccggtgagaagagaaatggcttgtttgggaatctcattgctttgtcattgggattgacccctaattttaaatcaaattttgatttggcagaagatgctaaattacagctttcaaaagatacttacgatgatgatttagataatttattggcgcaaattggagatcaatatgctgatttgtttttggcagctaagaatttatcagatgctattttactttcagatatcctaagagtaaatagtgaaataactaaggctcccctatcagcttcaatgattaagcgctacgatgaacatcatcaagacttgactcttttaaaagctttagttcgacaacaacttccagaaaagtataaagaaatcttttttgatcaatcaaaaaacggatatgcaggttatattgatgggggagctagccaagaagaattttataaatttatcaaaccaattttagaaaaaatggatggtactgaggaattattggtgaaactaaatcgtgaagatttgctgcgcaagcaacggacctttgacaacggctctattccccatcaaattcacttgggtgagctgcatgctattttgagaagacaagaagacttttatccatttttaaaagacaatcgtgagaagattgaaaaaatcttgacttttcgaattccttattatgttggtccattggcgcgtggcaatagtcgttttgcatggatgactcggaagtctgaagaaacaattaccccatggaattttgaagaagttgtcgataaaggtgcttcagctcaatcatttattgaacgcatgacaaactttgataaaaatcttccaaatgaaaaagtactaccaaaacatagtttgctttatgagtattttacggtttataacgaattgacaaaggtcaaatatgttactgagggaatgcgaaaaccagcatttctttcaggtgaacagaagaaagccattgttgatttactcttcaaaacaaatcgaaaagtaaccgttaagcaattaaaagaagattatttcaaaaaaatagaatgttttgatagtgttgaaatttcaggagttgaagatagatttaatgcttcattaggcgcctaccatgatttgctaaaaattattaaagataaagattttttggataatgaagaaaatgaagatatcttagaggatattgttttaacattgaccttatttgaagatagggggatgattgaggaaagacttaaaacatatgctcacctctttgatgataaggtgatgaaacagcttaaacgtcgccgttatactggttggggacgtttgtctcgaaaattgattaatggtattagggataagcaatctggcaaaacaatattagattttttgaaatcagatggttttgccaatcgcaattttatgcagctgatccatgatgatagtttgacatttaaagaagatattcaaaaagcacaggtgtctggacaaggccatagtttacatgaacagattgctaacttagctggcagtcctgctattaaaaaaggtattttacagactgtaaaaattgttgatgaactggtcaaagtaatggggcataagccagaaaatatcgttattgaaatggcacgtgaaaatcagacaactcaaaagggccagaaaaattcgcgagagcgtatgaaacgaatcgaagaaggtatcaaagaattaggaagtcagattcttaaagagcatcctgttgaaaatactcaattgcaaaatgaaaagctctatctctattatctacaaaatggaagagacatgtatgtggaccaagaattagatattaatcgtttaagtgattatgatgtcgatcacattgttccacaaagtttcattaaagacgattcaatagacaataaggtactaacgcgttctgataaaaatcgtggtaaatcggataacgttccaagtgaagaagtagtcaaaaagatgaaaaactattggagacaacttctaaacgccaagttaatcactcaacgtaagtttgataatttaacgaaagctgaacgtggaggtttgagtgaacttgataaagctggttttatcaaacgccaattggttgaaactcgccaaatcactaagcatgtggcacaaattttggatagtcgcatgaatactaaatacgatgaaaatgataaacttattcgagaggttaaagtgattaccttaaaatctaaattagtttctgacttccgaaaagatttccaattctataaagtacgtgagattaacaattaccatcatgcccatgatgcgtatctaaatgccgtcgttggaactgctttgattaagaaatatccaaaacttgaatcggagtttgtctatggtgattataaagtttatgatgttcgtaaaatgattgctaagtctgagcaagaaataggcaaagcaaccgcaaaatatttcttttactctaatatcatgaacttcttcaaaacagaaattacacttgcaaatggagagattcgcaaacgccctctaatcgaaactaatggggaaactggagaaattgtctgggataaagggcgagattttgccacagtgcgcaaagtattgtccatgccccaagtcaatattgtcaagaaaacagaagtacagacaggcggattctccaaggagtcaattttaccaaaaagaaattcggacaagcttattgctcgtaaaaaagactgggatccaaaaaaatatggtggttttgatagtccaacggtagcttattcagtcctagtggttgctaaggtggaaaaagggaaatcgaagaagttaaaatccgttaaagagttactagggatcacaattatggaaagaagttcctttgaaaaaaatccgattgactttttagaagctaaaggatataaggaagttaaaaaagacttaatcattaaactacctaaatatagtctttttgagttagaaaacggtcgtaaacggatgctggctagtgccggagaattacaaaaaggaaatgagctggctctgccaagcaaatatgtgaattttttatatttagctagtcattatgaaaagttgaagggtagtccagaagataacgaacaaaaacaattgtttgtggagcagcataagcattatttagatgagattattgagcaaatcagtgaattttctaagcgtgttattttagcagatgccaatttagataaagttcttagtgcatataacaaacatagagacaaaccaatacgtgaacaagcagaaaatattattcatttatttacgttgacgaatcttggagctcccgctgcttttaaatattttgatacaacaattgatcgtaaacgatatacgtctacaaaagaagttttagatgccactcttatccatcaatccatcactggtctttatgaaacacgcattgatttgagtcagctaggaggtgactga

SEQ ID NO: 200 - protein, 1367 aa, Streptococcus pyogenes
  MISC_FEATURE (1)..(1367): spCas9 polypeptide sequence
MDKKYSIGLDIGTNSVGWAVITDDYKVPSKKFKVLGNTDRHSIKKNLIGALLFGSGETAEATRLKRTARRRYTRRKNRICYLQEIFSNEMAKVDDSFFHRLEESFLVEEDKKHERHPIFGNIVDEVAYHEKYPTIYHLRKKLADSTDKADLRLIYLALAHMIKFRGHFLIEGDLNPDNSDVDKLFIQLVQIYNQLFEENPINASRVDAKAILSARLSKSRRLENLIAQLPGEKRNGLFGNLIALSLGLTPNFKSNFDLAEDAKLQLSKDTYDDDLDNLLAQIGDQYADLFLAAKNLSDAILLSDILRVNSEITKAPLSASMIKRYDEHHQDLTLLKALVRQQLPEKYKEIFFDQSKNGYAGYIDGGASQEEFYKFIKPILEKMDGTEELLVKLNREDLLRKQRTFDNGSIPHQIHLGELHAILRRQEDFYPFLKDNREKIEKILTFRIPYYVGPLARGNSRFAWMTRKSEETITPWNFEEVVDKGASAQSFIERMTNFDKNLPNEKVLPKHSLLYEYFTVYNELTKVKYVTEGMRKPAFLSGEQKKAIVDLLFKTNRKVTVKQLKEDYFKKIECFDSVEISGVEDRFNASLGAYHDLLKIIKDKDFLDNEENEDILEDIVLTLTLFEDRGMIEERLKTYAHLFDDKVMKQLKRRRYTGWGRLSRKLINGIRDKQSGKTILDFLKSDGFANRNFMQLIHDDSLTFKEDIQKAQVSGQGHSLHEQIANLAGSPAIKKGILQTVKIVDELVKVMGHKPENIVIEMARENQTTQKGQKNSRERMKRIEEGIKELGSQILKEHPVENTQLQNEKLYLYYLQNGRDMYVDQELDINRLSDYDVDHIVPQSFIKDDSIDNKVLTRSDKNRGKSDNVPSEEVVKKMKNYWRQLLNAKLITQRKFDNLTKAERGGLSELDKAGFIKRQLVETRQITKHVAQILDSRMNTKYDENDKLIREVKVITLKSKLVSDFRKDFQFYKVREINNYHHAHDAYLNAVVGTALIKKYPKLESEFVYGDYKVYDVRKMIAKSEQEIGKATAKYFFYSNIMNFFKTEITLANGEIRKRPLIETNGETGEIVWDKGRDFATVRKVLSMPQVNIVKKTEVQTGGFSKESILPKRNSDKLIARKKDWDPKKYGGFDSPTVAYSVLVVAKVEKGKSKKLKSVKELLGITIMERSSFEKNPIDFLEAKGYKEVKKDLIIKLPKYSLFELENGRKRMLASAGELQKGNELALPSKYVNFLYLASHYEKLKGSPEDNEQKQLFVEQHKHYLDEIIEQISEFSKRVILADANLDKVLSAYNKHRDKPIREQAENIIHLFTLTNLGAPAAFKYFDTTIDRKRYTSTKEVLDATLIHQSITGLYETRIDLSQLGGD

SEQ ID NO: 201 - DNA, 4212 bp, Artificial Sequence
  Description of artificial sequence: wild-type Cas9 polynucleotide sequence
  misc_feature (5)..(58): RuvC domain
  misc_feature (718)..(764): RuvC domain
  misc_feature (772)..(901): HNH domain
  misc_feature (906)..(1101): RuvC domain
atggataaaaagtattctattggtttagacatcggcactaattccgttggatgggctgtcataaccgatgaatacaaagtaccttcaaagaaatttaaggtgttggggaacacagaccgtcattcgattaaaaagaatcttatcggtgccctcctattcgatagtggcgaaacggcagaggcgactcgcctgaaacgaaccgctcggagaaggtatacacgtcgcaagaaccgaatatgttacttacaagaaatttttagcaatgagatggccaaagttgacgattctttctttcaccgtttggaagagtccttccttgtcgaagaggacaagaaacatgaacggcaccccatctttggaaacatagtagatgaggtggcatatcatgaaaagtacccaacgatttatcacctcagaaaaaagctagttgactcaactgataaagcggacctgaggttaatctacttggctcttgcccatatgataaagttccgtgggcactttctcattgagggtgatctaaatccggacaactcggatgtcgacaaactgttcatccagttagtacaaacctataatcagttgtttgaagagaaccctataaatgcaagtggcgtggatgcgaaggctattcttagcgcccgcctctctaaatcccgacggctagaaaacctgatcgcacaattacccggagagaagaaaaatgggttgttcggtaaccttatagcgctctcactaggcctgacaccaaattttaagtcgaacttcgacttagctgaagatgccaaattgcagcttagtaaggacacgtacgatgacgatctcgacaatctactggcacaaattggagatcagtatgcggacttatttttggctgccaaaaaccttagcgatgcaatcctcctatctgacatactgagagttaatactgagattaccaaggcgccgttatccgcttcaatgatcaaaaggtacgatgaacatcaccaagacttgacacttctcaaggccctagtccgtcagcaactgcctgagaaatataaggaaatattctttgatcagtcgaaaaacgggtacgcaggttatattgacggcggagcgagtcaagaggaattctacaagtttatcaaacccatattagagaagatggatgggacggaagagttgcttgtaaaactcaatcgcgaagatctactgcgaaagcagcggactttcgacaacggtagcattccacatcaaatccacttaggcgaattgcatgctatacttagaaggcaggaggatttttatccgttcctcaaagacaatcgtgaaaagattgagaaaatcctaacctttcgcataccttactatgtgggacccctggcccgagggaactctcggttcgcatggatgacaagaaagtccgaagaaacgattactccatggaattttgaggaagttgtcgataaaggtgcgtcagctcaatcgttcatcgagaggatgaccaactttgacaagaatttaccgaacgaaaaagtattgcctaagcacagtttactttacgagtatttcacagtgtacaatgaactcacgaaagttaagtatgtcactgagggcatgcgtaaacccgcctttctaagcggagaacagaagaaagcaatagtagatctgttattcaagaccaaccgcaaagtgacagttaagcaattgaaagaggactactttaagaaaattgaatgcttcgattctgtcgagatctccggggtagaagatcgatttaatgcgtcacttggtacgtatcatgacctcctaaagataattaaagataaggacttcctggataacgaagagaatgaagatatcttagaagatatagtgttgactcttaccctctttgaagatcgggaaatgattgaggaaagactaaaaacatacgctcacctgttcgacgataaggttatgaaacagttaaagaggcgtcgctatacgggctggggacgattgtcgcggaaacttatcaacgggataagagacaagcaaagtggtaaaactattctcgattttctaaagagcgacggcttcgccaataggaactttatgcagctgatccatgatgactctttaaccttcaaagaggatatacaaaaggcacaggtttccggacaaggggactcattgcacgaacatattgcgaatcttgctggttcgccagccatcaaaaagggcatactccagacagtcaaagtagtggatgagctagttaaggtcatgggacgtcacaaaccggaaaacattgtaatcgagatggcacgcgaaaatcaaacgactcagaaggggcaaaaaaacagtcgagagcggatgaagagaatagaagagggtattaaagaactgggcagccagatcttaaaggagcatcctgtggaaaatacccaattgcagaacgagaaactttacctctattacctacaaaatggaagggacatgtatgttgatcaggaactggacataaaccgtttatctgattacgacgtcgatcacattgtaccccaatcctttttgaaggacgattcaatcgacaataaagtgcttacacgctcggataagaaccgagggaaaagtgacaatgttccaagcgaggaagtcgtaaagaaaatgaagaactattggcggcagctcctaaatgcgaaactgataacgcaaagaaagttcgataacttaactaaagctgagaggggtggcttgtctgaacttgacaaggccggatttattaaacgtcagctcgtggaaacccgccaaatcacaaagcatgttgcacagatactagattcccgaatgaatacgaaatacgacgagaacgataagctgattcgggaagtcaaagtaatcactttaaagtcaaaattggtgtcggacttcagaaaggattttcaattctataaagttagggagataaataactaccaccatgcgcacgacgcttatcttaatgccgtcgtagggaccgcactcattaagaaatacccgaagctagaaagtgagtttgtgtatggtgattacaaagtttatgacgtccgtaagatgatcgcgaaaagcgaacaggagataggcaaggctacagccaaatacttcttttattctaacattatgaatttctttaagacggaaatcactctggcaaacggagagatacgcaaacgacctttaattgaaaccaatggggagacaggtgaaatcgtatgggataagggccgggacttcgcgacggtgagaaaagttttgtccatgccccaagtcaacatagtaaagaaaactgaggtgcagaccggagggttttcaaaggaatcgattcttccaaaaaggaatagtgataagctcatcgctcgtaaaaaggactgggacccgaaaaagtacggtggcttcgatagccctacagttgcctattctgtcctagtagtggcaaaagttgagaagggaaaatccaagaaactgaagtcagtcaaagaattattggggataacgattatggagcgctcgtcttttgaaaagaaccccatcgacttccttgaggcgaaaggttacaaggaagtaaaaaaggatctcataattaaactaccaaagtatagtctgtttgagttagaaaatggccgaaaacggatgttggctagcgccggagagcttcaaaaggggaacgaactcgcactaccgtctaaatacgtgaatttcctgtatttagcgtcccattacgagaagttgaaaggttcacctgaagataacgaacagaagcaactttttgttgagcagcacaaacattatctcgacgaaatcatagagcaaatttcggaattcagtaagagagtcatcctagctgatgccaatctggacaaagtattaagcgcatacaacaagcacagggataaacccatacgtgagcaggcggaaaatattatccatttgtttactcttaccaacctcggcgctccagccgcattcaagtattttgacacaacgatagatcgcaaacgatacacttctaccaaggaggtgctagacgcgacactgattcaccaatccatcacgggattatatgaaactcggatagatttgtcacagcttgggggtgacggatcccccaagaagaagaggaaagtctcgagcgactacaaagaccatgacggtgattataaagatcatgacatcgattacaaggatgacgatgacaaggctgcagga

SEQ ID NO: 202 - protein, 1368 aa, Artificial Sequence
  Description of artificial sequence: exemplary catalytically active Cas9 nickase (nCas9) polypeptide sequence
MDKKYSIGLAIGTNSVGWAVITDEYKVPSKKFKVLGNTDRHSIKKNLIGALLFDSGETAEATRLKRTARRRYTRRKNRICYLQEIFSNEMAKVDDSFFHRLEESFLVEEDKKHERHPIFGNIVDEVAYHEKYPTIYHLRKKLVDSTDKADLRLIYLALAHMIKFRGHFLIEGDLNPDNSDVDKLFIQLVQTYNQLFEENPINASGVDAKAILSARLSKSRRLENLIAQLPGEKKNGLFGNLIALSLGLTPNFKSNFDLAEDAKLQLSKDTYDDDLDNLLAQIGDQYADLFLAAKNLSDAILLSDILRVNTEITKAPLSASMIKRYDEHHQDLTLLKALVRQQLPEKYKEIFFDQSKNGYAGYIDGGASQEEFYKFIKPILEKMDGTEELLVKLNREDLLRKQRTFDNGSIPHQIHLGELHAILRRQEDFYPFLKDNREKIEKILTFRIPYYVGPLARGNSRFAWMTRKSEETITPWNFEEVVDKGASAQSFIERMTNFDKNLPNEKVLPKHSLLYEYFTVYNELTKVKYVTEGMRKPAFLSGEQKKAIVDLLFKTNRKVTVKQLKEDYFKKIECFDSVEISGVEDRFNASLGTYHDLLKIIKDKDFLDNEENEDILEDIVLTLTLFEDREMIEERLKTYAHLFDDKVMKQLKRRRYTGWGRLSRKLINGIRDKQSGKTILDFLKSDGFANRNFMQLIHDDSLTFKEDIQKAQVSGQGDSLHEHIANLAGSPAIKKGILQTVKVVDELVKVMGRHKPENIVIEMARENQTTQKGQKNSRERMKRIEEGIKELGSQILKEHPVENTQLQNEKLYLYYLQNGRDMYVDQELDINRLSDYDVDHIVPQSFLKDDSIDNKVLTRSDKNRGKSDNVPSEEVVKKMKNYWRQLLNAKLITQRKFDNLTKAERGGLSELDKAGFIKRQLVETRQITKHVAQILDSRMNTKYDENDKLIREVKVITLKSKLVSDFRKDFQFYKVREINNYHHAHDAYLNAVVGTALIKKYPKLESEFVYGDYKVYDVRKMIAKSEQEIGKATAKYFFYSNIMNFFKTEITLANGEIRKRPLIETNGETGEIVWDKGRDFATVRKVLSMPQVNIVKKTEVQTGGFSKESILPKRNSDKLIARKKDWDPKKYGGFDSPTVAYSVLVVAKVEKGKSKKLKSVKELLGITIMERSSFEKNPIDFLEAKGYKEVKKDLIIKLPKYSLFELENGRKRMLASAGELQKGNELALPSKYVNFLYLASHYEKLKGSPEDNEQKQLFVEQHKHYLDEIIEQISEFSKRVILADANLDKVLSAYNKHRDKPIREQAENIIHLFTLTNLGAPAAFKYFDTTIDRKRYTSTKEVLDATLIHQSITGLYETRIDLSQLGGD

SEQ ID NO: 203 - DNA, 4107 bp, Streptococcus pyogenes
  misc_feature (1)..(4107): Cas9 from Streptococcus pyogenes (NCBI Ref. Seq.: NC_002737.2) polynucleotide sequence
atggataagaaatactcaataggcttagatatcggcacaaatagcgtcggatgggcggtgatcactgatgaatataaggttccgtctaaaaagttcaaggttctgggaaatacagaccgccacagtatcaaaaaaaatcttataggggctcttttatttgacagtggagagacagcggaagcgactcgtctcaaacggacagctcgtagaaggtatacacgtcggaagaatcgtatttgttatctacaggagattttttcaaatgagatggcgaaagtagatgatagtttctttcatcgacttgaagagtcttttttggtggaagaagacaagaagcatgaacgtcatcctatttttggaaatatagtagatgaagttgcttatcatgagaaatatccaactatctatcatctgcgaaaaaaattggtagattctactgataaagcggatttgcgcttaatctatttggccttagcgcatatgattaagtttcgtggtcattttttgattgagggagatttaaatcctgataatagtgatgtggacaaactatttatccagttggtacaaacctacaatcaattatttgaagaaaaccctattaacgcaagtggagtagatgctaaagcgattctttctgcacgattgagtaaatcaagacgattagaaaatctcattgctcagctccccggtgagaagaaaaatggcttatttgggaatctcattgctttgtcattgggtttgacccctaattttaaatcaaattttgatttggcagaagatgctaaattacagctttcaaaagatacttacgatgatgatttagataatttattggcgcaaattggagatcaatatgctgatttgtttttggcagctaagaatttatcagatgctattttactttcagatatcctaagagtaaatactgaaataactaaggctcccctatcagcttcaatgattaaacgctacgatgaacatcatcaagacttgactcttttaaaagctttagttcgacaacaacttccagaaaagtataaagaaatcttttttgatcaatcaaaaaacggatatgcaggttatattgatgggggagctagccaagaagaattttataaatttatcaaaccaattttagaaaaaatggatggtactgaggaattattggtgaaactaaatcgtgaagatttgctgcgcaagcaacggacctttgacaacggctctattccccatcaaattcacttgggtgagctgcatgctattttgagaagacaagaagacttttatccatttttaaaagacaatcgtgagaagattgaaaaaatcttgacttttcgaattccttattatgttggtccattggcgcgtggcaatagtcgttttgcatggatgactcggaagtctgaagaaacaattaccccatggaattttgaagaagttgtcgataaaggtgcttcagctcaatcatttattgaacgcatgacaaactttgataaaaatcttccaaatgaaaaagtactaccaaaacatagtttgctttatgagtattttacggtttataacgaattgacaaaggtcaaatatgttactgaaggaatgcgaaaaccagcatttctttcaggtgaacagaagaaagccattgttgatttactcttcaaaacaaatcgaaaagtaaccgttaagcaattaaaagaagattatttcaaaaaaatagaatgttttgatagtgttgaaatttcaggagttgaagatagatttaatgcttcattaggtacctaccatgatttgctaaaaattattaaagataaagattttttggataatgaagaaaatgaagatatcttagaggatattgttttaacattgaccttatttgaagatagggagatgattgaggaaagacttaaaacatatgctcacctctttgatgataaggtgatgaaacagcttaaacgtcgccgttatactggttggggacgtttgtctcgaaaattgattaatggtattagggataagcaatctggcaaaacaatattagattttttgaaatcagatggttttgccaatcgcaattttatgcagctgatccatgatgatagtttgacatttaaagaagacattcaaaaagcacaagtgtctggacaaggcgatagtttacatgaacatattgcaaatttagctggtagccctgctattaaaaaaggtattttacagactgtaaaagttgttgatgaattggtcaaagtaatggggcggcataagccagaaaatatcgttattgaaatggcacgtgaaaatcagacaactcaaaagggccagaaaaattcgcgagagcgtatgaaacgaatcgaagaaggtatcaaagaattaggaagtcagattcttaaagagcatcctgttgaaaatactcaattgcaaaatgaaaagctctatctctattatctccaaaatggaagagacatgtatgtggaccaagaattagatattaatcgtttaagtgattatgatgtcgatcacattgttccacaaagtttccttaaagacgattcaatagacaataaggtcttaacgcgttctgataaaaatcgtggtaaatcggataacgttccaagtgaagaagtagtcaaaaagatgaaaaactattggagacaacttctaaacgccaagttaatcactcaacgtaagtttgataatttaacgaaagctgaacgtggaggtttgagtgaacttgataaagctggttttatcaaacgccaattggttgaaactcgccaaatcactaagcatgtggcacaaattttggatagtcgcatgaatactaaatacgatgaaaatgataaacttattcgagaggttaaagtgattaccttaaaatctaaattagtttctgacttccgaaaagatttccaattctataaagtacgtgagattaacaattaccatcatgcccatgatgcgtatctaaatgccgtcgttggaactgctttgattaagaaatatccaaaacttgaatcggagtttgtctatggtgattataaagtttatgatgttcgtaaaatgattgctaagtctgagcaagaaataggcaaagcaaccgcaaaatatttcttttactctaatatcatgaacttcttcaaaacagaaattacacttgcaaatggagagattcgcaaacgccctctaatcgaaactaatggggaaactggagaaattgtctgggataaagggcgagattttgccacagtgcgcaaagtattgtccatgccccaagtcaatattgtcaagaaaacagaagtacagacaggcggattctccaaggagtcaattttaccaaaaagaaattcggacaagcttattgctcgtaaaaaagactgggatccaaaaaaatatggtggttttgatagtccaacggtagcttattcagtcctagtggttgctaaggtggaaaaagggaaatcgaagaagttaaaatccgttaaagagttactagggatcacaattatggaaagaagttcctttgaaaaaaatccgattgactttttagaagctaaaggatataaggaagttaaaaaagacttaatcattaaactacctaaatatagtctttttgagttagaaaacggtcgtaaacggatgctggctagtgccggagaattacaaaaaggaaatgagctggctctgccaagcaaatatgtgaattttttatatttagctagtcattatgaaaagttgaagggtagtccagaagataacgaacaaaaacaattgtttgtggagcagcataagcattatttagatgagattattgagcaaatcagtgaattttctaagcgtgttattttagcagatgccaatttagataaagttcttagtgcatataacaaacatagagacaaaccaatacgtgaacaagcagaaaatattattcatttatttacgttgacgaatcttggagctcccgctgcttttaaatattttgatacaacaattgatcgtaaacgatatacgtctacaaaagaagttttagatgccactcttatccatcaatccatcactggtctttatgaaacacgcattgatttgagtcagctaggaggtgactga

SEQ ID NO: 204 - protein, 1368 aa, Artificial Sequence
  Description of sequence: catalytically inactive Cas9 (dCas9) polypeptide sequence
  MISC_FEATURE (5)..(58): RuvC domain
  MISC_FEATURE (718)..(764): RuvC domain
  MISC_FEATURE (773)..(902): HNH domain
  MISC_FEATURE (907)..(1102): RuvC domain
MDKKYSIGLAIGTNSVGWAVITDEYKVPSKKFKVLGNTDRHSIKKNLIGALLFDSGETAEATRLKRTARRRYTRRKNRICYLQEIFSNEMAKVDDSFFHRLEESFLVEEDKKHERHPIFGNIVDEVAYHEKYPTIYHLRKKLVDSTDKADLRLIYLALAHMIKFRGHFLIEGDLNPDNSDVDKLFIQLVQTYNQLFEENPINASGVDAKAILSARLSKSRRLENLIAQLPGEKKNGLFGNLIALSLGLTPNFKSNFDLAEDAKLQLSKDTYDDDLDNLLAQIGDQYADLFLAAKNLSDAILLSDILRVNTEITKAPLSASMIKRYDEHHQDLTLLKALVRQQLPEKYKEIFFDQSKNGYAGYIDGGASQEEFYKFIKPILEKMDGTEELLVKLNREDLLRKQRTFDNGSIPHQIHLGELHAILRRQEDFYPFLKDNREKIEKILTFRIPYYVGPLARGNSRFAWMTRKSEETITPWNFEEVVDKGASAQSFIERMTNFDKNLPNEKVLPKHSLLYEYFTVYNELTKVKYVTEGMRKPAFLSGEQKKAIVDLLFKTNRKVTVKQLKEDYFKKIECFDSVEISGVEDRFNASLGTYHDLLKIIKDKDFLDNEENEDILEDIVLTLTLFEDREMIEERLKTYAHLFDDKVMKQLKRRRYTGWGRLSRKLINGIRDKQSGKTILDFLKSDGFANRNFMQLIHDDSLTFKEDIQKAQVSGQGDSLHEHIANLAGSPAIKKGILQTVKVVDELVKVMGRHKPENIVIEMARENQTTQKGQKNSRERMKRIEEGIKELGSQILKEHPVENTQLQNEKLYLYYLQNGRDMYVDQELDINRLSDYDVDAIVPQSFLKDDSIDNKVLTRSDKNRGKSDNVPSEEVVKKMKNYWRQLLNAKLITQRKFDNLTKAERGGLSELDKAGFIKRQLVETRQITKHVAQILDSRMNTKYDENDKLIREVKVITLKSKLVSDFRKDFQFYKVREINNYHHAHDAYLNAVVGTALIKKYPKLESEFVYGDYKVYDVRKMIAKSEQEIGKATAKYFFYSNIMNFFKTEITLANGEIRKRPLIETNGETGEIVWDKGRDFATVRKVLSMPQVNIVKKTEVQTGGFSKESILPKRNSDKLIARKKDWDPKKYGGFDSPTVAYSVLVVAKVEKGKSKKLKSVKELLGITIMERSSFEKNPIDFLEAKGYKEVKKDLIIKLPKYSLFELENGRKRMLASAGELQKGNELALPSKYVNFLYLASHYEKLKGSPEDNEQKQLFVEQHKHYLDEIIEQISEFSKRVILADANLDKVLSAYNKHRDKPIREQAENIIHLFTLTNLGAPAAFKYFDTTIDRKRYTSTKEVLDATLIHQSITGLYETRIDLSQLGGD

SEQ ID NO: 205 - protein, 345 aa, Sulfolobus islandicus
  MISC_FEATURE (1)..(345): tr|F0NN87|F0NN87_SULIHCRISPR-associatedCasx protein OS = Sulfolobus islandicus (strain HVE10/4) GN = SiH_0402 PE=4 SV=1); CasX polypeptide sequence
MEVPLYNIFGDNYIIQVATEAENSTIYNNKVEIDDEELRNVLNLAYKIAKNNEDAAAERRGKAKKKKGEEGETTTSNIILPLSGNDKNPWTETLKCYNFPTTVALSEVFKNFSQVKECEEVSAPSFVKPEFYEFGRSPGMVERTRRVKLEVEPHYLIIAAAGWVLTRLGKAKVSEGDYVGVNVFTPTRGILYSLIQNVNGIVPGIKPETAFGLWIARKVVSSVTNPNVSVVRIYTISDAVGQNPTTINGGFSIDLTKLLEKRYLLSERLEAIARNALSISSNMRERYIVLANYIYEYLTGSKRLEDLLYFANRDLIMNLNSDDGKVRDLKLISAYVNGELIRGEG

SEQ ID NO: 206 - protein, 345 aa, Sulfolobus islandicus
  MISC_FEATURE (1)..(345): tr|F0NH53|F0NH53_SULIR CRISPR associated protein, Casx OS = Sulfolobus islandicus (strain REY15A) GN=SiRe_0771 PE=4 SV=1); CasX polypeptide sequence
MEVPLYNIFGDNYIIQVATEAENSTIYNNKVEIDDEELRNVLNLAYKIAKNNEDAAAERRGKAKKKKGEEGETTTSNIILPLSGNDKNPWTETLKCYNFPTTVALSEVFKNFSQVKECEEVSAPSFVKPEFYKFGRSPGMVERTRRVKLEVEPHYLIMAAAGWVLTRLGKAKVSEGDYVGVNVFTPTRGILYSLIQNVNGIVPGIKPETAFGLWIARKVVSSVTNPNVSVVSIYTISDAVGQNPTTINGGFSIDLTKLLEKRDLLSERLEAIARNALSISSNMRERYIVLANYIYEYLTGSKRLEDLLYFANRDLIMNLNSDDGKVRDLKLISAYVNGELIRGEG

SEQ ID NO: 207 - protein, 987 aa, Deltaproteobacteria
  MISC_FEATURE (1)..(987): CasX polypeptide sequence
MEKRINKIRKKLSADNATKPVSRSGPMKTLLVRVMTDDLKKRLEKRRKKPEVMPQVISNNAANNLRMLLDDYTKMKEAILQVYWQEFKDDHVGLMCKFAQPASKKIDQNKLKPEMDEKGNLTTAGFACSQCGQPLFVYKLEQVSEKGKAYTNYFGRCNVAEHEKLILLAQLKPVKDSDEAVTYSLGKFGQRALDFYSIHVTKESTHPVKPLAQIAGNRYASGPVGKALSDACMGTIASFLSKYQDIIIEHQKVVKGNQKRLESLRELAGKENLEYPSVTLPPQPHTKEGVDFAYNEVIARVRMWVNLNLWQKLKLSRDDAKPLLRLKGFPSFPVVERRENEVDWWNTINEVKKLIDAKRDMGRVFWSGVTAEKRNTILEGYNYLPNENDHKKREGSLENPKKPAKRQFGDLLLYLEKKYAGDWGKVFDEAWERIDKKIAGLTSHIEREEARNAEDAQSKAVLTDWLRAKASFVLERLKEMDEKEFYACEIQLQKWYGDLRGNPFAVEAENRVVDISGFSIGSDGHSIQYRNLLAWKYLENGKREFYLLMNYGKKGRIRFTDGTDIKKSGKWQGLLYGGGKAKVIDLTFDPDDEQLIILPLAFGTRQGREFIWNDLLSLETGLIKLANGRVIEKTIYNKKIGRDEPALFVALTFERREVVDPSNIKPVNLIGVARGENIPAVIALTDPEGCPLPEFKDSSGGPTDILRIGEGYKEKQRAIQAAKEVEQRRAGGYSRKFASKSRNLADDMVRNSARDLFYHAVTHDAVLVFANLSRGFGRQGKRTFMTERQYTKMEDWLTAKLAYEGLTSKTYLSKTLAQYTSKTCSNCGFTITYADMDVMLVRLKKTSDGWATTLNNKELKAEYQITYYNRYKRQTVEKELSAELDRLSEESGNNDISKWTKGRRDEALFLLKKRFSHRPVQEQFVCLDCGHEVHAAEQAALNIARSWLFLNSNSTEFKSYKSGKQPFVGAWQAFYKRRLKEVWKPNA

SEQ ID NO: 208 - protein, 1210 aa, Parcubacteria group bacterium
  MISC_FEATURE (1)..(1210): APG80656.1 CRISPR-associated protein CasY [uncultured Parcubacteria group bacterium]; CasY polypeptide sequence
MSKRHPRISGVKGYRLHAQRLEYTGKSGAMRTIKYPLYSSPSGGRTVPREIVSAINDDYVGLYGLSNFDDLYNAEKRNEEKVYSVLDFWYDCVQYGAVFSYTAPGLLKNVAEVRGGSYELTKTLKGSHLYDELQIDKVIKFLNKKEISRANGSLDKLKKDIIDCFKAEYRERHKDQCNKLADDIKNAKKDAGASLGERQKKLFRDFFGISEQSENDKPSFTNPLNLTCCLLPFDTVNNNRNRGEVLFNKLKEYAQKLDKNEGSLEMWEYIGIGNSGTAFSNFLGEGFLGRLRENKITELKKAMMDITDAWRGQEQEEELEKRLRILAALTIKLREPKFDNHWGGYRSDINGKLSSWLQNYINQTVKIKEDLKGHKKDLKKAKEMINRFGESDTKEEAVVSSLLESIEKIVPDDSADDEKPDIPAIAIYRRFLSDGRLTLNRFVQREDVQEALIKERLEAEKKKKPKKRKKKSDAEDEKETIDFKELFPHLAKPLKLVPNFYGDSKRELYKKYKNAAIYTDALWKAVEKIYKSAFSSSLKNSFFDTDFDKDFFIKRLQKIFSVYRRFNTDKWKPIVKNSFAPYCDIVSLAENEVLYKPKQSRSRKSAAIDKNRVRLPSTENIAKAGIALARELSVAGFDWKDLLKKEEHEEYIDLIELHKTALALLLAVTETQLDISALDFVENGTVKDFMKTRDGNLVLEGRFLEMFSQSIVFSELRGLAGLMSRKEFITRSAIQTMNGKQAELLYIPHEFQSAKITTPKEMSRAFLDLAPAEFATSLEPESLSEKSLLKLKQMRYYPHYFGYELTRTGQGIDGGVAENALRLEKSPVKKREIKCKQYKTLGRGQNKIVLYVRSSYYQTQFLEWFLHRPKNVQTDVAVSGSFLIDEKKVKTRWNYDALTVALEPVSGSERVFVSQPFTIFPEKSAEEEGQRYLGIDIGEYGIAYTALEITGDSAKILDQNFISDPQLKTLREEVKGLKLDQRRGTFAMPSTKIARIRESLVHSLRNRIHHLALKHKAKIVYELEVSRFEEGKQKIKKVYATLKKADVYSEIDADKNLQTTVWGKLAVASEISASYTSQFCGACKKLWRAEMQVDETITTQELIGTVRVIKGGTLIDAIKDFMRPPIFDENDTPFPKYRDFCDKHHISKKMRGNSCLFICPFCRANADADIQASQTIALLRYVKEEKKVEDYFERFRKLKNIKVLGQMKKI

SEQ ID NO: 209 - protein, 1082 aa, Neisseria meningitidis
  MISC_FEATURE (1)..(1082): NCBI Reference:  WP_002235162.1; type II CRISPR RNA-guided endonuclease Cas9; Nme1Cas9 polypeptide sequence
MAAFKPNPINYILGLDIGIASVGWAMVEIDEDENPICLIDLGVRVFERAEVPKTGDSLAMARRLARSVRRLTRRRAHRLLRARRLLKREGVLQAADFDENGLIKSLPNTPWQLRAAALDRKLTPLEWSAVLLHLIKHRGYLSQRKNEGETADKELGALLKGVADNAHALQTGDFRTPAELALNKFEKESGHIRNQRGDYSHTFSRKDLQAELILLFEKQKEFGNPHVSGGLKEGIETLLMTQRPALSGDAVQKMLGHCTFEPAEPKAAKNTYTAERFIWLTKLNNLRILEQGSERPLTDTERATLMDEPYRKSKLTYAQARKLLGLEDTAFFKGLRYGKDNAEASTLMEMKAYHAISRALEKEGLKDKKSPLNLSPELQDEIGTAFSLFKTDEDITGRLKDRIQPEILEALLKHISFDKFVQISLKALRRIVPLMEQGKRYDEACAEIYGDHYGKKNTEEKIYLPPIPADEIRNPVVLRALSQARKVINGVVRRYGSPARIHIETAREVGKSFKDRKEIEKRQEENRKDREKAAAKFREYFPNFVGEPKSKDILKLRLYEQQHGKCLYSGKEINLGRLNEKGYVEIDHALPFSRTWDDSFNNKVLVLGSENQNKGNQTPYEYFNGKDNSREWQEFKARVETSRFPRSKKQRILLQKFDEDGFKERNLNDTRYVNRFLCQFVADRMRLTGKGKKRVFASNGQITNLLRGFWGLRKVRAENDRHHALDAVVVACSTVAMQQKITRFVRYKEMNAFDGKTIDKETGEVLHQKTHFPQPWEFFAQEVMIRVFGKPDGKPEFEEADTPEKLRTLLAEKLSSRPEAVHEYVTPLFVSRAPNRKMSGQGHMETVKSAKRLDEGVSVLRVPLTQLKLKDLEKMVNREREPKLYEALKARLEAHKDDPAKAFAEPFYKYDKAGNRTQQVKAVRVEQVQKTGVWVRNHNGIADNATMVRVDVFEKGDKYYLVPIYSWQVAKGILPDRAVVQGKDEEDWQLIDDSFNFKFSLHPNDLVEVITKKARMFGYFASCHRGTGNINIRIHDLDHKIGKNGILEGIGVKTALSFQKYQIDELGKEIRPCRLKKRPPVR

SEQ ID NO: 210 - protein, 1082 aa, Neisseria meningitidis
  MISC_FEATURE (1)..(1082): NCBI Reference:  WP_002230835; type II CRISPR RNA-guided endonuclease Cas9; Nme2Cas9 polypeptide sequence
MAAFKPNPINYILGLDIGIASVGWAMVEIDEEENPIRLIDLGVRVFERAEVPKTGDSLAMARRLARSVRRLTRRRAHRLLRARRLLKREGVLQAADFDENGLIKSLPNTPWQLRAAALDRKLTPLEWSAVLLHLIKHRGYLSQRKNEGETADKELGALLKGVANNAHALQTGDFRTPAELALNKFEKESGHIRNQRGDYSHTFSRKDLQAELILLFEKQKEFGNPHVSGGLKEGIETLLMTQRPALSGDAVQKMLGHCTFEPAEPKAAKNTYTAERFIWLTKLNNLRILEQGSERPLTDTERATLMDEPYRKSKLTYAQARKLLGLEDTAFFKGLRYGKDNAEASTLMEMKAYHAISRALEKEGLKDKKSPLNLSSELQDEIGTAFSLFKTDEDITGRLKDRVQPEILEALLKHISFDKFVQISLKALRRIVPLMEQGKRYDEACAEIYGDHYGKKNTEEKIYLPPIPADEIRNPVVLRALSQARKVINGVVRRYGSPARIHIETAREVGKSFKDRKEIEKRQEENRKDREKAAAKFREYFPNFVGEPKSKDILKLRLYEQQHGKCLYSGKEINLVRLNEKGYVEIDHALPFSRTWDDSFNNKVLVLGSENQNKGNQTPYEYFNGKDNSREWQEFKARVETSRFPRSKKQRILLQKFDEDGFKECNLNDTRYVNRFLCQFVADHILLTGKGKRRVFASNGQITNLLRGFWGLRKVRAENDRHHALDAVVVACSTVAMQQKITRFVRYKEMNAFDGKTIDKETGKVLHQKTHFPQPWEFFAQEVMIRVFGKPDGKPEFEEADTPEKLRTLLAEKLSSRPEAVHEYVTPLFVSRAPNRKMSGAHKDTLRSAKRFVKHNEKISVKRVWLTEIKLADLENMVNYKNGREIELYEALKARLEAYGGNAKQAFDPKDNPFYKKGGQLVKAVRVEKTQESGVLLNKKNAYTIADNGDMVRVDVFCKVDKKGKNQYFIVPIYAWQVAENILPDIDCKGYRIDDSYTFCFSLHKYDLIAFQKDEKSKVEFAYYINCDSSNGRFYLAWHDKGSKEQQFRISTQNLVLIQKYQVNELGKEIRPCRLKKRPPVR

SEQ ID NO: 211 - protein, 1300 aa, Francisella novicida
  MISC_FEATURE (1)..(1300): wild type Cpf1 polypeptide sequence
MSIYQEFVNKYSLSKTLRFELIPQGKTLENIKARGLILDDEKRAKDYKKAKQIIDKYHQFFIEEILSSVCISEDLLQNYSDVYFKLKKSDDDNLQKDFKSAKDTIKKQISEYIKDSEKFKNLFNQNLIDAKKGQESDLILWLKQSKDNGIELFKANSDITDIDEALEIIKSFKGWTTYFKGFHENRKNVYSSNDIPTSIIYRIVDDNLPKFLENKAKYESLKDKAPEAINYEQIKKDLAEELTFDIDYKTSEVNQRVFSLDEVFEIANFNNYLNQSGITKFNTIIGGKFVNGENTKRKGINEYINLYSQQINDKTLKKYKMSVLFKQILSDTESKSFVIDKLEDDSDVVTTMQSFYEQIAAFKTVEEKSIKETLSLLFDDLKAQKLDLSKIYFKNDKSLTDLSQQVFDDYSVIGTAVLEYITQQIAPKNLDNPSKKEQELIAKKTEKAKYLSLETIKLALEEFNKHRDIDKQCRFEEILANFAAIPMIFDEIAQNKDNLAQISIKYQNQGKKDLLQASAEDDVKAIKDLLDQTNNLLHKLKIFHISQSEDKANILDKDEHFYLVFEECYFELANIVPLYNKIRNYITQKPYSDEKFKLNFENSTLANGWDKNKEPDNTAILFIKDDKYYLGVMNKKNNKIFDDKAIKENKGEGYKKIVYKLLPGANKMLPKVFFSAKSIKFYNPSEDILRIRNHSTHTKNGSPQKGYEKFEFNIEDCRKFIDFYKQSISKHPEWKDFGFRFSDTQRYNSIDEFYREVENQGYKLTFENISESYIDSVVNQGKLYLFQIYNKDFSAYSKGRPNLHTLYWKALFDERNLQDVVYKLNGEAELFYRKQSIPKKITHPAKEAIANKNKDNPKKESVFEYDLIKDKRFTEDKFFFHCPITINFKSSGANKFNDEINLLLKEKANDVHILSIDRGERHLAYYTLVDGKGNIIKQDTFNIIGNDRMKTNYHDKLAAIEKDRDSARKDWKKINNIKEMKEGYLSQVVHEIAKLVIEYNAIVVFEDLNFGFKRGRFKVEKQVYQKLEKMLIEKLNYLVFKDNEFDKTGGVLRAYQLTAPFETFKKMGKQTGIIYYVPAGFTSKICPVTGFVNQLYPKYESVSKSQEFFSKFDKICYNLDKGYFEFSFDYKNFGDKAAKGKWTIASFGSRLINFRNSDKNHNWDTREVYPTKELEKLLKDYSIEYGHGECIKAAICGESDKKFFAKLTSVLNTILQMRNSKTGTELDYLISPVADVNGNFFDSRQAPKNMPQDADANGAYHIGLKGLMLLGRIKNNQEGKKLNLVIKNEEYFEFVQNRNN

SEQ ID NO: 212 - protein, 1300 aa, Francisella novicida
  MISC_FEATURE (1)..(1300): Cpf1 D917A polypeptide sequence
MSIYQEFVNKYSLSKTLRFELIPQGKTLENIKARGLILDDEKRAKDYKKAKQIIDKYHQFFIEEILSSVCISEDLLQNYSDVYFKLKKSDDDNLQKDFKSAKDTIKKQISEYIKDSEKFKNLFNQNLIDAKKGQESDLILWLKQSKDNGIELFKANSDITDIDEALEIIKSFKGWTTYFKGFHENRKNVYSSNDIPTSIIYRIVDDNLPKFLENKAKYESLKDKAPEAINYEQIKKDLAEELTFDIDYKTSEVNQRVFSLDEVFEIANFNNYLNQSGITKFNTIIGGKFVNGENTKRKGINEYINLYSQQINDKTLKKYKMSVLFKQILSDTESKSFVIDKLEDDSDVVTTMQSFYEQIAAFKTVEEKSIKETLSLLFDDLKAQKLDLSKIYFKNDKSLTDLSQQVFDDYSVIGTAVLEYITQQIAPKNLDNPSKKEQELIAKKTEKAKYLSLETIKLALEEFNKHRDIDKQCRFEEILANFAAIPMIFDEIAQNKDNLAQISIKYQNQGKKDLLQASAEDDVKAIKDLLDQTNNLLHKLKIFHISQSEDKANILDKDEHFYLVFEECYFELANIVPLYNKIRNYITQKPYSDEKFKLNFENSTLANGWDKNKEPDNTAILFIKDDKYYLGVMNKKNNKIFDDKAIKENKGEGYKKIVYKLLPGANKMLPKVFFSAKSIKFYNPSEDILRIRNHSTHTKNGSPQKGYEKFEFNIEDCRKFIDFYKQSISKHPEWKDFGFRFSDTQRYNSIDEFYREVENQGYKLTFENISESYIDSVVNQGKLYLFQIYNKDFSAYSKGRPNLHTLYWKALFDERNLQDVVYKLNGEAELFYRKQSIPKKITHPAKEAIANKNKDNPKKESVFEYDLIKDKRFTEDKFFFHCPITINFKSSGANKFNDEINLLLKEKANDVHILSIARGERHLAYYTLVDGKGNIIKQDTFNIIGNDRMKTNYHDKLAAIEKDRDSARKDWKKINNIKEMKEGYLSQVVHEIAKLVIEYNAIVVFEDLNFGFKRGRFKVEKQVYQKLEKMLIEKLNYLVFKDNEFDKTGGVLRAYQLTAPFETFKKMGKQTGIIYYVPAGFTSKICPVTGFVNQLYPKYESVSKSQEFFSKFDKICYNLDKGYFEFSFDYKNFGDKAAKGKWTIASFGSRLINFRNSDKNHNWDTREVYPTKELEKLLKDYSIEYGHGECIKAAICGESDKKFFAKLTSVLNTILQMRNSKTGTELDYLISPVADVNGNFFDSRQAPKNMPQDADANGAYHIGLKGLMLLGRIKNNQEGKKLNLVIKNEEYFEFVQNRNN

SEQ ID NO: 213 - protein, 1300 aa, Francisella novicida
  MISC_FEATURE (1)..(1300): Cpf1 E1006A polypeptide sequence
MSIYQEFVNKYSLSKTLRFELIPQGKTLENIKARGLILDDEKRAKDYKKAKQIIDKYHQFFIEEILSSVCISEDLLQNYSDVYFKLKKSDDDNLQKDFKSAKDTIKKQISEYIKDSEKFKNLFNQNLIDAKKGQESDLILWLKQSKDNGIELFKANSDITDIDEALEIIKSFKGWTTYFKGFHENRKNVYSSNDIPTSIIYRIVDDNLPKFLENKAKYESLKDKAPEAINYEQIKKDLAEELTFDIDYKTSEVNQRVFSLDEVFEIANFNNYLNQSGITKFNTIIGGKFVNGENTKRKGINEYINLYSQQINDKTLKKYKMSVLFKQILSDTESKSFVIDKLEDDSDVVTTMQSFYEQIAAFKTVEEKSIKETLSLLFDDLKAQKLDLSKIYFKNDKSLTDLSQQVFDDYSVIGTAVLEYITQQIAPKNLDNPSKKEQELIAKKTEKAKYLSLETIKLALEEFNKHRDIDKQCRFEEILANFAAIPMIFDEIAQNKDNLAQISIKYQNQGKKDLLQASAEDDVKAIKDLLDQTNNLLHKLKIFHISQSEDKANILDKDEHFYLVFEECYFELANIVPLYNKIRNYITQKPYSDEKFKLNFENSTLANGWDKNKEPDNTAILFIKDDKYYLGVMNKKNNKIFDDKAIKENKGEGYKKIVYKLLPGANKMLPKVFFSAKSIKFYNPSEDILRIRNHSTHTKNGSPQKGYEKFEFNIEDCRKFIDFYKQSISKHPEWKDFGFRFSDTQRYNSIDEFYREVENQGYKLTFENISESYIDSVVNQGKLYLFQIYNKDFSAYSKGRPNLHTLYWKALFDERNLQDVVYKLNGEAELFYRKQSIPKKITHPAKEAIANKNKDNPKKESVFEYDLIKDKRFTEDKFFFHCPITINFKSSGANKFNDEINLLLKEKANDVHILSIDRGERHLAYYTLVDGKGNIIKQDTFNIIGNDRMKTNYHDKLAAIEKDRDSARKDWKKINNIKEMKEGYLSQVVHEIAKLVIEYNAIVVFADLNFGFKRGRFKVEKQVYQKLEKMLIEKLNYLVFKDNEFDKTGGVLRAYQLTAPFETFKKMGKQTGIIYYVPAGFTSKICPVTGFVNQLYPKYESVSKSQEFFSKFDKICYNLDKGYFEFSFDYKNFGDKAAKGKWTIASFGSRLINFRNSDKNHNWDTREVYPTKELEKLLKDYSIEYGHGECIKAAICGESDKKFFAKLTSVLNTILQMRNSKTGTELDYLISPVADVNGNFFDSRQAPKNMPQDADANGAYHIGLKGLMLLGRIKNNQEGKKLNLVIKNEEYFEFVQNRNN

SEQ ID NO: 214 - protein, 1300 aa, Francisella novicida
  MISC_FEATURE (1)..(1300): Cpf1 D1255A polypeptide sequence
MSIYQEFVNKYSLSKTLRFELIPQGKTLENIKARGLILDDEKRAKDYKKAKQIIDKYHQFFIEEILSSVCISEDLLQNYSDVYFKLKKSDDDNLQKDFKSAKDTIKKQISEYIKDSEKFKNLFNQNLIDAKKGQESDLILWLKQSKDNGIELFKANSDITDIDEALEIIKSFKGWTTYFKGFHENRKNVYSSNDIPTSIIYRIVDDNLPKFLENKAKYESLKDKAPEAINYEQIKKDLAEELTFDIDYKTSEVNQRVFSLDEVFEIANFNNYLNQSGITKFNTIIGGKFVNGENTKRKGINEYINLYSQQINDKTLKKYKMSVLFKQILSDTESKSFVIDKLEDDSDVVTTMQSFYEQIAAFKTVEEKSIKETLSLLFDDLKAQKLDLSKIYFKNDKSLTDLSQQVFDDYSVIGTAVLEYITQQIAPKNLDNPSKKEQELIAKKTEKAKYLSLETIKLALEEFNKHRDIDKQCRFEEILANFAAIPMIFDEIAQNKDNLAQISIKYQNQGKKDLLQASAEDDVKAIKDLLDQTNNLLHKLKIFHISQSEDKANILDKDEHFYLVFEECYFELANIVPLYNKIRNYITQKPYSDEKFKLNFENSTLANGWDKNKEPDNTAILFIKDDKYYLGVMNKKNNKIFDDKAIKENKGEGYKKIVYKLLPGANKMLPKVFFSAKSIKFYNPSEDILRIRNHSTHTKNGSPQKGYEKFEFNIEDCRKFIDFYKQSISKHPEWKDFGFRFSDTQRYNSIDEFYREVENQGYKLTFENISESYIDSVVNQGKLYLFQIYNKDFSAYSKGRPNLHTLYWKALFDERNLQDVVYKLNGEAELFYRKQSIPKKITHPAKEAIANKNKDNPKKESVFEYDLIKDKRFTEDKFFFHCPITINFKSSGANKFNDEINLLLKEKANDVHILSIDRGERHLAYYTLVDGKGNIIKQDTFNIIGNDRMKTNYHDKLAAIEKDRDSARKDWKKINNIKEMKEGYLSQVVHEIAKLVIEYNAIVVFEDLNFGFKRGRFKVEKQVYQKLEKMLIEKLNYLVFKDNEFDKTGGVLRAYQLTAPFETFKKMGKQTGIIYYVPAGFTSKICPVTGFVNQLYPKYESVSKSQEFFSKFDKICYNLDKGYFEFSFDYKNFGDKAAKGKWTIASFGSRLINFRNSDKNHNWDTREVYPTKELEKLLKDYSIEYGHGECIKAAICGESDKKFFAKLTSVLNTILQMRNSKTGTELDYLISPVADVNGNFFDSRQAPKNMPQDAAANGAYHIGLKGLMLLGRIKNNQEGKKLNLVIKNEEYFEFVQNRNN

SEQ ID NO: 215 - protein, 1300 aa, Francisella novicida
  MISC_FEATURE (1)..(1300): Cpf1 D917A/E1006A polypeptide sequence
MSIYQEFVNKYSLSKTLRFELIPQGKTLENIKARGLILDDEKRAKDYKKAKQIIDKYHQFFIEEILSSVCISEDLLQNYSDVYFKLKKSDDDNLQKDFKSAKDTIKKQISEYIKDSEKFKNLFNQNLIDAKKGQESDLILWLKQSKDNGIELFKANSDITDIDEALEIIKSFKGWTTYFKGFHENRKNVYSSNDIPTSIIYRIVDDNLPKFLENKAKYESLKDKAPEAINYEQIKKDLAEELTFDIDYKTSEVNQRVFSLDEVFEIANFNNYLNQSGITKFNTIIGGKFVNGENTKRKGINEYINLYSQQINDKTLKKYKMSVLFKQILSDTESKSFVIDKLEDDSDVVTTMQSFYEQIAAFKTVEEKSIKETLSLLFDDLKAQKLDLSKIYFKNDKSLTDLSQQVFDDYSVIGTAVLEYITQQIAPKNLDNPSKKEQELIAKKTEKAKYLSLETIKLALEEFNKHRDIDKQCRFEEILANFAAIPMIFDEIAQNKDNLAQISIKYQNQGKKDLLQASAEDDVKAIKDLLDQTNNLLHKLKIFHISQSEDKANILDKDEHFYLVFEECYFELANIVPLYNKIRNYITQKPYSDEKFKLNFENSTLANGWDKNKEPDNTAILFIKDDKYYLGVMNKKNNKIFDDKAIKENKGEGYKKIVYKLLPGANKMLPKVFFSAKSIKFYNPSEDILRIRNHSTHTKNGSPQKGYEKFEFNIEDCRKFIDFYKQSISKHPEWKDFGFRFSDTQRYNSIDEFYREVENQGYKLTFENISESYIDSVVNQGKLYLFQIYNKDFSAYSKGRPNLHTLYWKALFDERNLQDVVYKLNGEAELFYRKQSIPKKITHPAKEAIANKNKDNPKKESVFEYDLIKDKRFTEDKFFFHCPITINFKSSGANKFNDEINLLLKEKANDVHILSIARGERHLAYYTLVDGKGNIIKQDTFNIIGNDRMKTNYHDKLAAIEKDRDSARKDWKKINNIKEMKEGYLSQVVHEIAKLVIEYNAIVVFADLNFGFKRGRFKVEKQVYQKLEKMLIEKLNYLVFKDNEFDKTGGVLRAYQLTAPFETFKKMGKQTGIIYYVPAGFTSKICPVTGFVNQLYPKYESVSKSQEFFSKFDKICYNLDKGYFEFSFDYKNFGDKAAKGKWTIASFGSRLINFRNSDKNHNWDTREVYPTKELEKLLKDYSIEYGHGECIKAAICGESDKKFFAKLTSVLNTILQMRNSKTGTELDYLISPVADVNGNFFDSRQAPKNMPQDADANGAYHIGLKGLMLLGRIKNNQEGKKLNLVIKNEEYFEFVQNRNN

SEQ ID NO: 216 - protein, 1300 aa, Francisella novicida
  MISC_FEATURE (1)..(1300): Cpf1 D917A/D1255A polypeptide sequence
MSIYQEFVNKYSLSKTLRFELIPQGKTLENIKARGLILDDEKRAKDYKKAKQIIDKYHQFFIEEILSSVCISEDLLQNYSDVYFKLKKSDDDNLQKDFKSAKDTIKKQISEYIKDSEKFKNLFNQNLIDAKKGQESDLILWLKQSKDNGIELFKANSDITDIDEALEIIKSFKGWTTYFKGFHENRKNVYSSNDIPTSIIYRIVDDNLPKFLENKAKYESLKDKAPEAINYEQIKKDLAEELTFDIDYKTSEVNQRVFSLDEVFEIANFNNYLNQSGITKFNTIIGGKFVNGENTKRKGINEYINLYSQQINDKTLKKYKMSVLFKQILSDTESKSFVIDKLEDDSDVVTTMQSFYEQIAAFKTVEEKSIKETLSLLFDDLKAQKLDLSKIYFKNDKSLTDLSQQVFDDYSVIGTAVLEYITQQIAPKNLDNPSKKEQELIAKKTEKAKYLSLETIKLALEEFNKHRDIDKQCRFEEILANFAAIPMIFDEIAQNKDNLAQISIKYQNQGKKDLLQASAEDDVKAIKDLLDQTNNLLHKLKIFHISQSEDKANILDKDEHFYLVFEECYFELANIVPLYNKIRNYITQKPYSDEKFKLNFENSTLANGWDKNKEPDNTAILFIKDDKYYLGVMNKKNNKIFDDKAIKENKGEGYKKIVYKLLPGANKMLPKVFFSAKSIKFYNPSEDILRIRNHSTHTKNGSPQKGYEKFEFNIEDCRKFIDFYKQSISKHPEWKDFGFRFSDTQRYNSIDEFYREVENQGYKLTFENISESYIDSVVNQGKLYLFQIYNKDFSAYSKGRPNLHTLYWKALFDERNLQDVVYKLNGEAELFYRKQSIPKKITHPAKEAIANKNKDNPKKESVFEYDLIKDKRFTEDKFFFHCPITINFKSSGANKFNDEINLLLKEKANDVHILSIARGERHLAYYTLVDGKGNIIKQDTFNIIGNDRMKTNYHDKLAAIEKDRDSARKDWKKINNIKEMKEGYLSQVVHEIAKLVIEYNAIVVFEDLNFGFKRGRFKVEKQVYQKLEKMLIEKLNYLVFKDNEFDKTGGVLRAYQLTAPFETFKKMGKQTGIIYYVPAGFTSKICPVTGFVNQLYPKYESVSKSQEFFSKFDKICYNLDKGYFEFSFDYKNFGDKAAKGKWTIASFGSRLINFRNSDKNHNWDTREVYPTKELEKLLKDYSIEYGHGECIKAAICGESDKKFFAKLTSVLNTILQMRNSKTGTELDYLISPVADVNGNFFDSRQAPKNMPQDAAANGAYHIGLKGLMLLGRIKNNQEGKKLNLVIKNEEYFEFVQNRNN

SEQ ID NO: 217 - protein, 1300 aa, Francisella novicida
  MISC_FEATURE (1)..(1300): Cpf1 E1006A/D1255A polypeptide sequence
MSIYQEFVNKYSLSKTLRFELIPQGKTLENIKARGLILDDEKRAKDYKKAKQIIDKYHQFFIEEILSSVCISEDLLQNYSDVYFKLKKSDDDNLQKDFKSAKDTIKKQISEYIKDSEKFKNLFNQNLIDAKKGQESDLILWLKQSKDNGIELFKANSDITDIDEALEIIKSFKGWTTYFKGFHENRKNVYSSNDIPTSIIYRIVDDNLPKFLENKAKYESLKDKAPEAINYEQIKKDLAEELTFDIDYKTSEVNQRVFSLDEVFEIANFNNYLNQSGITKFNTIIGGKFVNGENTKRKGINEYINLYSQQINDKTLKKYKMSVLFKQILSDTESKSFVIDKLEDDSDVVTTMQSFYEQIAAFKTVEEKSIKETLSLLFDDLKAQKLDLSKIYFKNDKSLTDLSQQVFDDYSVIGTAVLEYITQQIAPKNLDNPSKKEQELIAKKTEKAKYLSLETIKLALEEFNKHRDIDKQCRFEEILANFAAIPMIFDEIAQNKDNLAQISIKYQNQGKKDLLQASAEDDVKAIKDLLDQTNNLLHKLKIFHISQSEDKANILDKDEHFYLVFEECYFELANIVPLYNKIRNYITQKPYSDEKFKLNFENSTLANGWDKNKEPDNTAILFIKDDKYYLGVMNKKNNKIFDDKAIKENKGEGYKKIVYKLLPGANKMLPKVFFSAKSIKFYNPSEDILRIRNHSTHTKNGSPQKGYEKFEFNIEDCRKFIDFYKQSISKHPEWKDFGFRFSDTQRYNSIDEFYREVENQGYKLTFENISESYIDSVVNQGKLYLFQIYNKDFSAYSKGRPNLHTLYWKALFDERNLQDVVYKLNGEAELFYRKQSIPKKITHPAKEAIANKNKDNPKKESVFEYDLIKDKRFTEDKFFFHCPITINFKSSGANKFNDEINLLLKEKANDVHILSIDRGERHLAYYTLVDGKGNIIKQDTFNIIGNDRMKTNYHDKLAAIEKDRDSARKDWKKINNIKEMKEGYLSQVVHEIAKLVIEYNAIVVFADLNFGFKRGRFKVEKQVYQKLEKMLIEKLNYLVFKDNEFDKTGGVLRAYQLTAPFETFKKMGKQTGIIYYVPAGFTSKICPVTGFVNQLYPKYESVSKSQEFFSKFDKICYNLDKGYFEFSFDYKNFGDKAAKGKWTIASFGSRLINFRNSDKNHNWDTREVYPTKELEKLLKDYSIEYGHGECIKAAICGESDKKFFAKLTSVLNTILQMRNSKTGTELDYLISPVADVNGNFFDSRQAPKNMPQDAAANGAYHIGLKGLMLLGRIKNNQEGKKLNLVIKNEEYFEFVQNRNN

SEQ ID NO: 218 - protein, 1300 aa, Francisella novicida
  MISC_FEATURE (1)..(1300): Cpf1 D917A/E1006A/D1255A polypeptide sequence
MSIYQEFVNKYSLSKTLRFELIPQGKTLENIKARGLILDDEKRAKDYKKAKQIIDKYHQFFIEEILSSVCISEDLLQNYSDVYFKLKKSDDDNLQKDFKSAKDTIKKQISEYIKDSEKFKNLFNQNLIDAKKGQESDLILWLKQSKDNGIELFKANSDITDIDEALEIIKSFKGWTTYFKGFHENRKNVYSSNDIPTSIIYRIVDDNLPKFLENKAKYESLKDKAPEAINYEQIKKDLAEELTFDIDYKTSEVNQRVFSLDEVFEIANFNNYLNQSGITKFNTIIGGKFVNGENTKRKGINEYINLYSQQINDKTLKKYKMSVLFKQILSDTESKSFVIDKLEDDSDVVTTMQSFYEQIAAFKTVEEKSIKETLSLLFDDLKAQKLDLSKIYFKNDKSLTDLSQQVFDDYSVIGTAVLEYITQQIAPKNLDNPSKKEQELIAKKTEKAKYLSLETIKLALEEFNKHRDIDKQCRFEEILANFAAIPMIFDEIAQNKDNLAQISIKYQNQGKKDLLQASAEDDVKAIKDLLDQTNNLLHKLKIFHISQSEDKANILDKDEHFYLVFEECYFELANIVPLYNKIRNYITQKPYSDEKFKLNFENSTLANGWDKNKEPDNTAILFIKDDKYYLGVMNKKNNKIFDDKAIKENKGEGYKKIVYKLLPGANKMLPKVFFSAKSIKFYNPSEDILRIRNHSTHTKNGSPQKGYEKFEFNIEDCRKFIDFYKQSISKHPEWKDFGFRFSDTQRYNSIDEFYREVENQGYKLTFENISESYIDSVVNQGKLYLFQIYNKDFSAYSKGRPNLHTLYWKALFDERNLQDVVYKLNGEAELFYRKQSIPKKITHPAKEAIANKNKDNPKKESVFEYDLIKDKRFTEDKFFFHCPITINFKSSGANKFNDEINLLLKEKANDVHILSIARGERHLAYYTLVDGKGNIIKQDTFNIIGNDRMKTNYHDKLAAIEKDRDSARKDWKKINNIKEMKEGYLSQVVHEIAKLVIEYNAIVVFADLNFGFKRGRFKVEKQVYQKLEKMLIEKLNYLVFKDNEFDKTGGVLRAYQLTAPFETFKKMGKQTGIIYYVPAGFTSKICPVTGFVNQLYPKYESVSKSQEFFSKFDKICYNLDKGYFEFSFDYKNFGDKAAKGKWTIASFGSRLINFRNSDKNHNWDTREVYPTKELEKLLKDYSIEYGHGECIKAAICGESDKKFFAKLTSVLNTILQMRNSKTGTELDYLISPVADVNGNFFDSRQAPKNMPQDAAANGAYHIGLKGLMLLGRIKNNQEGKKLNLVIKNEEYFEFVQNRNN

SEQ ID NO: 219 - protein, 1052 aa, Staphylococcus aureus
  MISC_FEATURE (1)..(1052): Exemplary SaCas9 polypeptide sequence
KRNYILGLDIGITSVGYGIIDYETRDVIDAGVRLFKEANVENNEGRRSKRGARRLKRRRRHRIQRVKKLLFDYNLLTDHSELSGINPYEARVKGLSQKLSEEEFSAALLHLAKRRGVHNVNEVEEDTGNELSTKEQISRNSKALEEKYVAELQLERLKKDGEVRGSINRFKTSDYVKEAKQLLKVQKAYHQLDQSFIDTYIDLLETRRTYYEGPGEGSPFGWKDIKEWYEMLMGHCTYFPEELRSVKYAYNADLYNALNDLNNLVITRDENEKLEYYEKFQIIENVFKQKKKPTLKQIAKEILVNEEDIKGYRVTSTGKPEFTNLKVYHDIKDITARKEIIENAELLDQIAKILTIYQSSEDIQEELTNLNSELTQEEIEQISNLKGYTGTHNLSLKAINLILDELWHTNDNQIAIFNRLKLVPKKVDLSQQKEIPTTLVDDFILSPVVKRSFIQSIKVINAIIKKYGLPNDIIIELAREKNSKDAQKMINEMQKRNRQTNERIEEIIRTTGKENAKYLIEKIKLHDMQEGKCLYSLEAIPLEDLLNNPFNYEVDHIIPRSVSFDNSFNNKVLVKQEENSKKGNRTPFQYLSSSDSKISYETFKKHILNLAKGKGRISKTKKEYLLEERDINRFSVQKDFINRNLVDTRYATRGLMNLLRSYFRVNNLDVKVKSINGGFTSFLRRKWKFKKERNKGYKHHAEDALIIANADFIFKEWKKLDKAKKVMENQMFEEKQAESMPEIETEQEYKEIFITPHQIKHIKDFKDYKYSHRVDKKPNRELINDTLYSTRKDDKGNTLIVNNLNGLYDKDNDKLKKLINKSPEKLLMYHHDPQTYQKLKLIMEQYGDEKNPLYKYYEETGNYLTKYSKKDNGPVIKKIKYYGNKLNAHLDITDDYPNSRNKVVKLSLKPYRFDVYLDNGVYKFVTVKNLDVIKKENYYEVNSKCYEEAKKLKKISNQAEFIASFYNNDLIKINGELYRVIGVNNDLLNRIEVNMIDITYREYLENMNDKRPPRIIKTIASKTQSIKKYSTDILGNLYEVKSKKHPQIIKKG

SEQ ID NO: 220 - protein, 1052 aa, Staphylococcus aureus
  MISC_FEATURE (1)..(1052): SaCas9n polypeptide sequence
KRNYILGLDIGITSVGYGIIDYETRDVIDAGVRLFKEANVENNEGRRSKRGARRLKRRRRHRIQRVKKLLFDYNLLTDHSELSGINPYEARVKGLSQKLSEEEFSAALLHLAKRRGVHNVNEVEEDTGNELSTKEQISRNSKALEEKYVAELQLERLKKDGEVRGSINRFKTSDYVKEAKQLLKVQKAYHQLDQSFIDTYIDLLETRRTYYEGPGEGSPFGWKDIKEWYEMLMGHCTYFPEELRSVKYAYNADLYNALNDLNNLVITRDENEKLEYYEKFQIIENVFKQKKKPTLKQIAKEILVNEEDIKGYRVTSTGKPEFTNLKVYHDIKDITARKEIIENAELLDQIAKILTIYQSSEDIQEELTNLNSELTQEEIEQISNLKGYTGTHNLSLKAINLILDELWHTNDNQIAIFNRLKLVPKKVDLSQQKEIPTTLVDDFILSPVVKRSFIQSIKVINAIIKKYGLPNDIIIELAREKNSKDAQKMINEMQKRNRQTNERIEEIIRTTGKENAKYLIEKIKLHDMQEGKCLYSLEAIPLEDLLNNPFNYEVDHIIPRSVSFDNSFNNKVLVKQEEASKKGNRTPFQYLSSSDSKISYETFKKHILNLAKGKGRISKTKKEYLLEERDINRFSVQKDFINRNLVDTRYATRGLMNLLRSYFRVNNLDVKVKSINGGFTSFLRRKWKFKKERNKGYKHHAEDALIIANADFIFKEWKKLDKAKKVMENQMFEEKQAESMPEIETEQEYKEIFITPHQIKHIKDFKDYKYSHRVDKKPNRELINDTLYSTRKDDKGNTLIVNNLNGLYDKDNDKLKKLINKSPEKLLMYHHDPQTYQKLKLIMEQYGDEKNPLYKYYEETGNYLTKYSKKDNGPVIKKIKYYGNKLNAHLDITDDYPNSRNKVVKLSLKPYRFDVYLDNGVYKFVTVKNLDVIKKENYYEVNSKCYEEAKKLKKISNQAEFIASFYNNDLIKINGELYRVIGVNNDLLNRIEVNMIDITYREYLENMNDKRPPRIIKTIASKTQSIKKYSTDILGNLYEVKSKKHPQIIKKG

SEQ ID NO: 221 - protein, 1052 aa, Staphylococcus aureus
  MISC_FEATURE (1)..(1052): SaKKH Cas9 polypeptide sequence
KRNYILGLDIGITSVGYGIIDYETRDVIDAGVRLFKEANVENNEGRRSKRGARRLKRRRRHRIQRVKKLLFDYNLLTDHSELSGINPYEARVKGLSQKLSEEEFSAALLHLAKRRGVHNVNEVEEDTGNELSTKEQISRNSKALEEKYVAELQLERLKKDGEVRGSINRFKTSDYVKEAKQLLKVQKAYHQLDQSFIDTYIDLLETRRTYYEGPGEGSPFGWKDIKEWYEMLMGHCTYFPEELRSVKYAYNADLYNALNDLNNLVITRDENEKLEYYEKFQIIENVFKQKKKPTLKQIAKEILVNEEDIKGYRVTSTGKPEFTNLKVYHDIKDITARKEIIENAELLDQIAKILTIYQSSEDIQEELTNLNSELTQEEIEQISNLKGYTGTHNLSLKAINLILDELWHTNDNQIAIFNRLKLVPKKVDLSQQKEIPTTLVDDFILSPVVKRSFIQSIKVINAIIKKYGLPNDIIIELAREKNSKDAQKMINEMQKRNRQTNERIEEIIRTTGKENAKYLIEKIKLHDMQEGKCLYSLEAIPLEDLLNNPFNYEVDHIIPRSVSFDNSFNNKVLVKQEEASKKGNRTPFQYLSSSDSKISYETFKKHILNLAKGKGRISKTKKEYLLEERDINRFSVQKDFINRNLVDTRYATRGLMNLLRSYFRVNNLDVKVKSINGGFTSFLRRKWKFKKERNKGYKHHAEDALIIANADFIFKEWKKLDKAKKVMENQMFEEKQAESMPEIETEQEYKEIFITPHQIKHIKDFKDYKYSHRVDKKPNRKLINDTLYSTRKDDKGNTLIVNNLNGLYDKDNDKLKKLINKSPEKLLMYHHDPQTYQKLKLIMEQYGDEKNPLYKYYEETGNYLTKYSKKDNGPVIKKIKYYGNKLNAHLDITDDYPNSRNKVVKLSLKPYRFDVYLDNGVYKFVTVKNLDVIKKENYYEVNSKCYEEAKKLKKISNQAEFIASFYKNDLIKINGELYRVIGVNNDLLNRIEVNMIDITYREYLENMNDKRPPHIIKTIASKTQSIKKYSTDILGNLYEVKSKKHPQIIKKG

SEQ ID NO: 222 - protein, 707 aa, Artificial Sequence
  Description of artificial sequence: Casphi-1 polypeptide sequence
MADTPTLFTQFLRHHLPGQRFRKDILKQAGRILANKGEDATIAFLRGKSEESPPDFQPPVKCPIIACSRPLTEWPIYQASVAIQGYVYGQSLAEFEASDPGCSKDGLLGWFDKTGVCTDYFSVQGLNLIFQNARKRYIGVQTKVTNRNEKRHKKLKRINAKRIAEGLPELTSDEPESALDETGHLIDPPGLNTNIYCYQQVSPKPLALSEVNQLPTAYAGYSTSGDDPIQPMVTKDRLSISKGQPGYIPEHQRALLSQKKHRRMRGYGLKARALLVIVRIQDDWAVIDLRSLLRNAYWRRIVQTKEPSTITKLLKLVTGDPVLDATRMVATFTYKPGIVQVRSAKCLKNKQGSKLFSERYLNETVSVTSIDLGSNNLVAVATYRLVNGNTPELLQRFTLPSHLVKDFERYKQAHDTLEDSIQKTAVASLPQGQQTEIRMWSMYGFREAQERVCQELGLADGSIPWNVMTATSTILTDLFLARGGDPKKCMFTSEPKKKKNSKQVLYKIRDRAWAKMYRTLLSKETREAWNKALWGLKRGSPDYARLSKRKEELARRCVNYTISTAEKRAQCGRTIVALEDLNIGFFHGRGKQEPGWVGLFTRKKENRWLMQALHKAFLELAHHRGYHVIEVNPAYTSQTCPVCRHCDPDNRDQHNREAFHCIGCGFRGNADLDVATHNIAMVAITGESLKRARGSVASKTPQPLAAE

SEQ ID NO: 223 - protein, 757 aa, Artificial Sequence
  Description of artificial sequence: Casphi-2 polypeptide sequence
MPKPAVESEFSKVLKKHFPGERFRSSYMKRGGKILAAQGEEAVVAYLQGKSEEEPPNFQPPAKCHVVTKSRDFAEWPIMKASEAIQRYIYALSTTERAACKPGKSSESHAAWFAATGVSNHGYSHVQGLNLIFDHTLGRYDGVLKKVQLRNEKARARLESINASRADEGLPEIKAEEEEVATNETGHLLQPPGINPSFYVYQTISPQAYRPRDEIVLPPEYAGYVRDPNAPIPLGVVRNRCDIQKGCPGYIPEWQREAGTAISPKTGKAVTVPGLSPKKNKRMRRYWRSEKEKAQDALLVTVRIGTDWVVIDVRGLLRNARWRTIAPKDISLNALLDLFTGDPVIDVRRNIVTFTYTLDACGTYARKWTLKGKQTKATLDKLTATQTVALVAIDLGQTNPISAGISRVTQENGALQCEPLDRFTLPDDLLKDISAYRIAWDRNEEELRARSVEALPEAQQAEVRALDGVSKETARTQLCADFGLDPKRLPWDKMSSNTTFISEALLSNSVSRDQVFFTPAPKKGAKKKAPVEVMRKDRTWARAYKPRLSVEAQKLKNEALWALKRTSPEYLKLSRRKEELCRRSINYVIEKTRRRTQCQIVIPVIEDLNVRFFHGSGKRLPGWDNFFTAKKENRWFIQGLHKAFSDLRTHRSFYVFEVRPERTSITCPKCGHCEVGNRDGEAFQCLSCGKTCNADLDVATHNLTQVALTGKTMPKREEPRDAQGTAPARKTKKASKSKAPPAEREDQTPAQEPSQTS

SEQ ID NO: 224 - protein, 766 aa, Artificial Sequence
  Description of artificial sequence: Casphi-3 polypeptide sequence
MEKEITELTKIRREFPNKKFSSTDMKKAGKLLKAEGPDAVRDFLNSCQEIIGDFKPPVKTNIVSISRPFEEWPVSMVGRAIQEYYFSLTKEELESVHPGTSSEDHKSFFNITGLSNYNYTSVQGLNLIFKNAKAIYDGTLVKANNKNKKLEKKFNEINHKRSLEGLPIITPDFEEPFDENGHLNNPPGINRNIYGYQGCAAKVFVPSKHKMVSLPKEYEGYNRDPNLSLAGFRNRLEIPEGEPGHVPWFQRMDIPEGQIGHVNKIQRFNFVHGKNSGKVKFSDKTGRVKRYHHSKYKDATKPYKFLEESKKVSALDSILAIITIGDDWVVFDIRGLYRNVFYRELAQKGLTAVQLLDLFTGDPVIDPKKGVVTFSYKEGVVPVFSQKIVPRFKSRDTLEKLTSQGPVALLSVDLGQNEPVAARVCSLKNINDKITLDNSCRISFLDDYKKQIKDYRDSLDELEIKIRLEAINSLETNQQVEIRDLDVFSADRAKANTVDMFDIDPNLISWDSMSDARVSTQISDLYLKNGGDESRVYFEINNKRIKRSDYNISQLVRPKLSDSTRKNLNDSIWKLKRTSEEYLKLSKRKLELSRAVVNYTIRQSKLLSGINDIVIILEDLDVKKKFNGRGIRDIGWDNFFSSRKENRWFIPAFHKAFSELSSNRGLCVIEVNPAWTSATCPDCGFCSKENRDGINFTCRKCGVSYHADIDVATLNIARVAVLGKPMSGPADRERLGDTKKPRVARSRKTMKRKDISNSTVEAMVTA

SEQ ID NO: 225 - protein, 765 aa, Artificial Sequence
  Description of artificial sequence: Casphi-4 polypeptide sequence
MYSLEMADLKSEPSLLAKLLRDRFPGKYWLPKYWKLAEKKRLTGGEEAACEYMADKQLDSPPPNFRPPARCVILAKSRPFEDWPVHRVASKAQSFVIGLSEQGFAALRAAPPSTADARRDWLRSHGASEDDLMALEAQLLETIMGNAISLHGGVLKKIDNANVKAAKRLSGRNEARLNKGLQELPPEQEGSAYGADGLLVNPPGLNLNIYCRKSCCPKPVKNTARFVGHYPGYLRDSDSILISGTMDRLTIIEGMPGHIPAWQREQGLVKPGGRRRRLSGSESNMRQKVDPSTGPRRSTRSGTVNRSNQRTGRNGDPLLVEIRMKEDWVLLDARGLLRNLRWRESKRGLSCDHEDLSLSGLLALFSGDPVIDPVRNEVVFLYGEGIIPVRSTKPVGTRQSKKLLERQASMGPLTLISCDLGQTNLIAGRASAISLTHGSLGVRSSVRIELDPEIIKSFERLRKDADRLETEILTAAKETLSDEQRGEVNSHEKDSPQTAKASLCRELGLHPPSLPWGQMGPSTTFIADMLISHGRDDDAFLSHGEFPTLEKRKKFDKRFCLESRPLLSSETRKALNESLWEVKRTSSEYARLSQRKKEMARRAVNFVVEISRRKTGLSNVIVNIEDLNVRIFHGGGKQAPGWDGFFRPKSENRWFIQAIHKAFSDLAAHHGIPVIESDPQRTSMTCPECGHCDSKNRNGVRFLCKGCGASMDADFDAACRNLERVALTGKPMPKPSTSCERLLSATTGKVCSDHSLSHDAIEKAS

SEQ ID NO: 226 - protein, 793 aa, Artificial Sequence
  Description of artificial sequence: Casphi-5 polypeptide sequence
MSSLPTPLELLKQKHADLFKGLQFSSKDNKMAGKVLKKDGEEAALAFLSERGVSRGELPNFRPPAKTLVVAQSRPFEEFPIYRVSEAIQLYVYSLSVKELETVPSGSSTKKEHQRFFQDSSVPDFGYTSVQGLNKIFGLARGIYLGVITRGENQLQKAKSKHEALNKKRRASGEAETEFDPTPYEYMTPERKLAKPPGVNHSIMCYVDISVDEFDFRNPDGIVLPSEYAGYCREINTAIEKGTVDRLGHLKGGPGYIPGHQRKESTTEGPKINFRKGRIRRSYTALYAKRDSRRVRQGKLALPSYRHHMMRLNSNAESAILAVIFFGKDWVVFDLRGLLRNVRWRNLFVDGSTPSTLLGMFGDPVIDPKRGVVAFCYKEQIVPVVSKSITKMVKAPELLNKLYLKSEDPLVLVAIDLGQTNPVGVGVYRVMNASLDYEVVTRFALESELLREIESYRQRTNAFEAQIRAETFDAMTSEEQEEITRVRAFSASKAKENVCHRFGMPVDAVDWATMGSNTIHIAKWVMRHGDPSLVEVLEYRKDNEIKLDKNGVPKKVKLTDKRIANLTSIRLRFSQETSKHYNDTMWELRRKHPVYQKLSKSKADFSRRVVNSIIRRVNHLVPRARIVFIIEDLKNLGKVFHGSGKRELGWDSYFEPKSENRWFIQVLHKAFSETGKHKGYYIIECWPNWTSCTCPKCSCCDSENRHGEVFRCLACGYTCNTDFGTAPDNLVKIATTGKGLPGPKKRCKGSSKGKNPKIARSSETGVSVTESGAPKVKKSSPTQTSQSSSQSAP

SEQ ID NO: 227 - protein, 441 aa, Artificial Sequence
  Description of artificial sequence: Casphi-6 polypeptide sequence
MNKIEKEKTPLAKLMNENFAGLRFPFAIIKQAGKKLLKEGELKTIEYMTGKGSIEPLPNFKPPVKCLIVAKRRDLKYFPICKASCEIQSYVYSLNYKDFMDYFSTPMTSQKQHEEFFKKSGLNIEYQNVAGLNLIFNNVKNTYNGVILKVKNRNEKLKKKAIKNNYEFEEIKTFNDDGCLINKPGINNVIYCFQSISPKILKNITHLPKEYNDYDCSVDRNIIQKYVSRLDIPESQPGHVPEWQRKLPEFNNTNNPRRRRKWYSNGRNISKGYSVDQVNQAKIEDSLLAQIKIGEDWIILDIRGLLRDLNRRELISYKNKLTIKDVLGFFSDYPIIDIKKNLVTFCYKEGVIQVVSQKSIGNKKSKQLLEKLIENKPIALVSIDLGQTNPVSVKISKLNKINNKISIESFTYRFLNEEILKEIEKYRKDYDKLELKLINEA

SEQ ID NO: 228 - protein, 772 aa, Artificial Sequence
  Description of artificial sequence: Casphi-7 polypeptide sequence
MSNTAVSTREHMSNKTTPPSPLSLLLRAHFPGLKFESQDYKIAGKKLRDGGPEAVISYLTGKGQAKLKDVKPPAKAFVIAQSRPFIEWDLVRVSRQIQEKIFGIPATKGRPKQDGLSETAFNEAVASLEVDGKSKLNEETRAAFYEVLGLDAPSLHAQAQNALIKSAISIREGVLKKVENRNEKNLSKTKRRKEAGEEATFVEEKAHDERGYLIHPPGVNQTIPGYQAVVIKSCPSDFIGLPSGCLAKESAEALTDYLPHDRMTIPKGQPGYVPEWQHPLLNRRKNRRRRDWYSASLNKPKATCSKRSGTPNRKNSRTDQIQSGRFKGAIPVLMRFQDEWVIIDIRGLLRNARYRKLLKEKSTIPDLLSLFTGDPSIDMRQGVCTFIYKAGQACSAKMVKTKNAPEILSELTKSGPVVLVSIDLGQTNPIAAKVSRVTQLSDGQLSHETLLRELLSNDSSDGKEIARYRVASDRLRDKLANLAVERLSPEHKSEILRAKNDTPALCKARVCAALGLNPEMIAWDKMTPYTEFLATAYLEKGGDRKVATLKPKNRPEMLRRDIKFKGTEGVRIEVSPEAAEAYREAQWDLQRTSPEYLRLSTWKQELTKRILNQLRHKAAKSSQCEVVVMAFEDLNIKMMHGNGKWADGGWDAFFIKKRENRWFMQAFHKSLTELGAHKGVPTIEVTPHRTSITCTKCGHCDKANRDGERFACQKCGFVAHADLEIATDNIERVALTGKPMPKPESERSGDAKKSVGARKAAFKPEEDAEAAE

SEQ ID NO: 229 - protein, 717 aa, Artificial Sequence
  Description of artificial sequence: Casphi-8 polypeptide sequence
MIKPTVSQFLTPGFKLIRNHSRTAGLKLKNEGEEACKKFVRENEIPKDECPNFQGGPAIANIIAKSREFTEWEIYQSSLAIQEVIFTLPKDKLPEPILKEEWRAQWLSEHGLDTVPYKEAAGLNLIIKNAVNTYKGVQVKVDNKNKNNLAKINRKNEIAKLNGEQEISFEEIKAFDDKGYLLQKPSPNKSIYCYQSVSPKPFITSKYHNVNLPEEYIGYYRKSNEPIVSPYQFDRLRIPIGEPGYVPKWQYTFLSKKENKRRKLSKRIKNVSPILGIICIKKDWCVFDMRGLLRTNHWKKYHKPTDSINDLFDYFTGDPVIDTKANVVRFRYKMENGIVNYKPVREKKGKELLENICDQNGSCKLATVDVGQNNPVAIGLFELKKVNGELTKTLISRHPTPIDFCNKITAYRERYDKLESSIKLDAIKQLTSEQKIEVDNYNNNFTPQNTKQIVCSKLNINPNDLPWDKMISGTHFISEKAQVSNKSEIYFTSTDKGKTKDVMKSDYKWFQDYKPKLSKEVRDALSDIEWRLRRESLEFNKLSKSREQDARQLANWISSMCDVIGIENLVKKNNFFGGSGKREPGWDNFYKPKKENRWWINAIHKALTELSQNKGKRVILLPAMRTSITCPKCKYCDSKNRNGEKFNCLKCGIELNADIDVATENLATVAITAQSMPKPTCERSGDAKKPVRARKAKAPEFHDKLAPSYTVVLREAV

SEQ ID NO: 230 - protein, 793 aa, Artificial Sequence
  Description of artificial sequence: Casphi-9 polypeptide sequence
MRSSREIGDKILMRQPAEKTAFQVFRQEVIGTQKLSGGDAKTAGRLYKQGKMEAAREWLLKGARDDVPPNFQPPAKCLVVAVSHPFEEWDISKTNHDVQAYIYAQPLQAEGHLNGLSEKWEDTSADQHKLWFEKTGVPDRGLPVQAINKIAKAAVNRAFGVVRKVENRNEKRRSRDNRIAEHNRENGLTEVVREAPEVATNADGFLLHPPGIDPSILSYASVSPVPYNSSKHSFVRLPEEYQAYNVEPDAPIPQFVVEDRFAIPPGQPGYVPEWQRLKCSTNKHRRMRQWSNQDYKPKAGRRAKPLEFQAHLTRERAKGALLVVMRIKEDWVVFDVRGLLRNVEWRKVLSEEAREKLTLKGLLDLFTGDPVIDTKRGIVTFLYKAEITKILSKRTVKTKNARDLLLRLTEPGEDGLRREVGLVAVDLGQTHPIAAAIYRIGRTSAGALESTVLHRQGLREDQKEKLKEYRKRHTALDSRLRKEAFETLSVEQQKEIVTVSGSGAQITKDKVCNYLGVDPSTLPWEKMGSYTHFISDDFLRRGGDPNIVHFDRQPKKGKVSKKSQRIKRSDSQWVGRMRPRLSQETAKARMEADWAAQNENEEYKRLARSKQELARWCVNTLLQNTRCITQCDEIVVVIEDLNVKSLHGKGAREPGWDNFFTPKTENRWFIQILHKTFSELPKHRGEHVIEGCPLRTSITCPACSYCDKNSRNGEKFVCVACGATFHADFEVATYNLVRLATTGMPMPKSLERQGGGEKAGGARKARKKAKQVEKIVVQANANVTMNGASLHSP

SEQ ID NO: 231 - protein, 812 aa, Artificial Sequence
  Description of artificial sequence: Casphi-10 polypeptide sequence
MDMLDTETNYATETPAQQQDYSPKPPKKAQRAPKGFSKKARPEKKPPKPITLFTQKHFSGVRFLKRVIRDASKILKLSESRTITFLEQAIERDGSAPPDVTPPVHNTIMAVTRPFEEWPEVILSKALQKHCYALTKKIKIKTWPKKGPGKKCLAAWSARTKIPLIPGQVQATNGLFDRIGSIYDGVEKKVTNRNANKKLEYDEAIKEGRNPAVPEYETAYNIDGTLINKPGYNPNLYITQSRTPRLITEADRPLVEKILWQMVEKKTQSRNQARRARLEKAAHLQGLPVPKFVPEKVDRSQKIEIRIIDPLDKIEPYMPQDRMAIKASQDGHVPYWQRPFLSKRRNRRVRAGWGKQVSSIQAWLTGALLVIVRLGNEAFLADIRGALRNAQWRKLLKPDATYQSLFNLFTGDPVVNTRTNHLTMAYREGVVNIVKSRSFKGRQTREHLLTLLGQGKTVAGVSFDLGQKHAAGLLAAHFGLGEDGNPVFTPIQACFLPQRYLDSLTNYRNRYDALTLDMRRQSLLALTPAQQQEFADAQRDPGGQAKRACCLKLNLNPDEIRWDLVSGISTMISDLYIERGGDPRDVHQQVETKPKGKRKSEIRILKIRDGKWAYDFRPKIADETRKAQREQLWKLQKASSEFERLSRYKINIARAIANWALQWGRELSGCDIVIPVLEDLNVGSKFFDGKGKWLLGWDNRFTPKKENRWFIKVLHKAVAELAPHRGVPVYEVMPHRTSMTCPACHYCHPTNREGDRFECQSCHVVKNTDRDVAPYNILRVAVEGKTLDRWQAEKKPQAEPDRPMILIDNQES

SEQ ID NO: 232 - protein, 84 aa, Artificial Sequence
  Description of artificial sequence: synthetic polypeptide sequence
MTNLSDIIEKETGKQLVIQESILMLPEEVEEVIGNKPESDILVHTAYDESTDENVMLLTSDAPEYKPWALVIQDSNGENKIKML

SEQ ID NO: 233 - DNA, 23 bp, Artificial Sequence
  Description of artificial sequence: synthetic oligonucleotide sequence
gaacacaaagcatagactgcggg

SEQ ID NO: 234 - DNA, 23 bp, Artificial Sequence
  Description of artificial sequence: synthetic oligonucleotide sequence
gtcatcttagtcattacctgagg

SEQ ID NO: 235 - DNA, 23 bp, Artificial Sequence
  Description of artificial sequence: synthetic oligonucleotide sequence
gagtccgagcagaagaagaaggg

SEQ ID NO: 236 - DNA, 23 bp, Artificial Sequence
  Description of artificial sequence: synthetic oligonucleotide sequence
gctcccatcacatcaaccggtgg

SEQ ID NO: 237 - DNA, 23 bp, Artificial Sequence
  Description of artificial sequence: synthetic oligonucleotide sequence
ggcccagactgagcacgtgatgg

SEQ ID NO: 238 - DNA, 22 bp, Artificial Sequence
  Description of artificial sequence: synthetic oligonucleotide sequence
gtattactattattatctgaga

SEQ ID NO: 239 - DNA, 22 bp, Artificial Sequence
  Description of artificial sequence: synthetic oligonucleotide sequence
gtgggactgatcccttaatgtg

SEQ ID NO: 240 - DNA, 21 bp, Artificial Sequence
  Description of artificial sequence: synthetic oligonucleotide sequence
gaccaggtcagcaaacatgtt

SEQ ID NO: 241 - DNA, 22 bp, Artificial Sequence
  Description of artificial sequence: synthetic oligonucleotide sequence
gactcagcgcccctgccgggcc

SEQ ID NO: 242 - DNA, 21 bp, Artificial Sequence
  Description of artificial sequence: synthetic oligonucleotide sequence
gccacagtgggaggggacatg

SEQ ID NO: 243 - DNA, 21 bp, Artificial Sequence
  Description of artificial sequence: synthetic oligonucleotide sequence
gcccagcaattcactgtgaag

SEQ ID NO: 244 - DNA, 21 bp, Artificial Sequence
  Description of artificial sequence: synthetic oligonucleotide sequence
gcccagctccagcctctgatg

SEQ ID NO: 245 - DNA, 21 bp, Artificial Sequence
  Description of artificial sequence: synthetic oligonucleotide sequence
ggtcgacccttggtatccatg

SEQ ID NO: 246 - DNA, 21 bp, Artificial Sequence
  Description of artificial sequence: synthetic oligonucleotide sequence
ggtcgtagccagtccgaaccc

SEQ ID NO: 247 - protein, 1129 aa, Alicyclobacillus acido-terrestris
  MISC_FEATURE (1)..(1129): Cas12b/C2c1; sp|T0D7A2|C2C1_ALIAG CRISPR-associated endonuclease C2c1 OS = Alicyclobacillus acido-terrestris (strain ATCC 49025 / DSM 3922/ CIP 106132 / NCIMB 13137/GD3B) GN=c2c1 PE=1 SV=1; Cas12b/C2c1 polypeptide sequence
MAVKSIKVKLRLDDMPEIRAGLWKLHKEVNAGVRYYTEWLSLLRQENLYRRSPNGDGEQECDKTAEECKAELLERLRARQVENGHRGPAGSDDELLQLARQLYELLVPQAIGAKGDAQQIARKFLSPLADKDAVGGLGIAKAGNKPRWVRMREAGEPGWEEEKEKAETRKSADRTADVLRALADFGLKPLMRVYTDSEMSSVEWKPLRKGQAVRTWDRDMFQQAIERMMSWESWNQRVGQEYAKLVEQKNRFEQKNFVGQEHLVHLVNQLQQDMKEASPGLESKEQTAHYVTGRALRGSDKVFEKWGKLAPDAPFDLYDAEIKNVQRRNTRRFGSHDLFAKLAEPEYQALWREDASFLTRYAVYNSILRKLNHAKMFATFTLPDATAHPIWTRFDKLGGNLHQYTFLFNEFGERRHAIRFHKLLKVENGVAREVDDVTVPISMSEQLDNLLPRDPNEPIALYFRDYGAEQHFTGEFGGAKIQCRRDQLAHMHRRRGARDVYLNVSVRVQSQSEARGERRPPYAAVFRLVGDNHRAFVHFDKLSDYLAEHPDDGKLGSEGLLSGLRVMSVDLGLRTSASISVFRVARKDELKPNSKGRVPFFFPIKGNDNLVAVHERSQLLKLPGETESKDLRAIREERQRTLRQLRTQLAYLRLLVRCGSEDVGRRERSWAKLIEQPVDAANHMTPDWREAFENELQKLKSLHGICSDKEWMDAVYESVRRVWRHMGKQVRDWRKDVRSGERPKIRGYAKDVVGGNSIEQIEYLERQYKFLKSWSFFGKVSGQVIRAEKGSRFAITLREHIDHAKEDRLKKLADRIIMEALGYVYALDERGKGKWVAKYPPCQLILLEELSEYQFNNDRPPSENNQLMQWSHRGVFQELINQAQVHDLLVGTMYAAFSSRFDARTGAPGIRCRRVPARCTQEHNPEPFPWWLNKFVVEHTLDACPLRADDLIPTGEGEIFVSPFSAEEGDFHQIHADLNAAQNLQQRLWSDFDISQIRLRCDWGEVDGELVLIPRLTGKRTADSYSNKVFYTNTGVTYYERERGKKRRKVFAQEKLSEEEAELLVEADEAREKSVVLMRDPSGIINRGNWTRQKEFWSMVNQRIEGYLVKQIRSRVPLQDSACENTGDI

SEQ ID NO: 248 - protein, 1368 aa, Mus musculus
  MISC_FEATURE (1)..(1368): high fidelity Cas9 polypeptide sequence
MDKKYSIGLAIGTNSVGWAVITDEYKVPSKKFKVLGNTDRHSIKKNLIGALLFDSGETAEATRLKRTARRRYTRRKNRICYLQEIFSNEMAKVDDSFFHRLEESFLVEEDKKHERHPIFGNIVDEVAYHEKYPTIYHLRKKLVDSTDKADLRLIYLALAHMIKFRGHFLIEGDLNPDNSDVDKLFIQLVQTYNQLFEENPINASGVDAKAILSARLSKSRRLENLIAQLPGEKKNGLFGNLIALSLGLTPNFKSNFDLAEDAKLQLSKDTYDDDLDNLLAQIGDQYADLFLAAKNLSDAILLSDILRVNTEITKAPLSASMIKRYDEHHQDLTLLKALVRQQLPEKYKEIFFDQSKNGYAGYIDGGASQEEFYKFIKPILEKMDGTEELLVKLNREDLLRKQRTFDNGSIPHQIHLGELHAILRRQEDFYPFLKDNREKIEKILTFRIPYYVGPLARGNSRFAWMTRKSEETITPWNFEEVVDKGASAQSFIERMTAFDKNLPNEKVLPKHSLLYEYFTVYNELTKVKYVTEGMRKPAFLSGEQKKAIVDLLFKTNRKVTVKQLKEDYFKKIECFDSVEISGVEDRFNASLGTYHDLLKIIKDKDFLDNEENEDILEDIVLTLTLFEDREMIEERLKTYAHLFDDKVMKQLKRRRYTGWGALSRKLINGIRDKQSGKTILDFLKSDGFANRNFMALIHDDSLTFKEDIQKAQVSGQGDSLHEHIANLAGSPAIKKGILQTVKVVDELVKVMGRHKPENIVIEMARENQTTQKGQKNSRERMKRIEEGIKELGSQILKEHPVENTQLQNEKLYLYYLQNGRDMYVDQELDINRLSDYDVDHIVPQSFLKDDSIDNKVLTRSDKNRGKSDNVPSEEVVKKMKNYWRQLLNAKLITQRKFDNLTKAERGGLSELDKAGFIKRQLVETRAITKHVAQILDSRMNTKYDENDKLIREVKVITLKSKLVSDFRKDFQFYKVREINNYHHAHDAYLNAVVGTALIKKYPKLESEFVYGDYKVYDVRKMIAKSEQEIGKATAKYFFYSNIMNFFKTEITLANGEIRKRPLIETNGETGEIVWDKGRDFATVRKVLSMPQVNIVKKTEVQTGGFSKESILPKRNSDKLIARKKDWDPKKYGGFDSPTVAYSVLVVAKVEKGKSKKLKSVKELLGITIMERSSFEKNPIDFLEAKGYKEVKKDLIIKLPKYSLFELENGRKRMLASAGELQKGNELALPSKYVNFLYLASHYEKLKGSPEDNEQKQLFVEQHKHYLDEIIEQISEFSKRVILADANLDKVLSAYNKHRDKPIREQAENIIHLFTLTNLGAPAAFKYFDTTIDRKRYTSTKEVLDATLIHQSITGLYETRIDLSQLGGD

SEQ ID NO: 249 - protein, 1368 aa, S. pyogenes
  MISC_FEATURE (1)..(1368): PAM-binding SpEQR Cas9 polypeptide sequence
MDKKYSIGLAIGTNSVGWAVITDEYKVPSKKFKVLGNTDRHSIKKNLIGALLFDSGETAEATRLKRTARRRYTRRKNRICYLQEIFSNEMAKVDDSFFHRLEESVLVEEDKKHERHPIFGNIVDEVAYHEKYPTIYHLRKKLVDSTDKADLRLIYLALAHMIKFRGHFLIEGDLNPDNSDVDKLFIQLVQTYNQLFEENPINASGVDAKAILSARLSKSRRLENLIAQLPGEKKNGLFGNLIALSLGLTPNFKSNFDLAEDAKLQLSKDTYDDDLDNLLAQIGDQYADLFLAAKNLSDAILLSDILRVNTEITKAPLSASMIKRYDEHHQDLTLLKALVRQQLPEKYKEIFFDQSKNGYAGYIDGGASQEEFYKFIKPILEKMDGTEELLVKLNREDLLRKQRTFDNGSIPHQIHLGELHAILRRQEDFYPFLKDNREKIEKILTFRIPYYVGPLARGNSRFAWMTRKSEETITPWNFEEVVDKGASAQSFIERMTNFDKNLPNEKVLPKHSLLYEYFTVYNELTKVKYVTEGMRKPAFLSGEQKKAIVDLLFKTNRKVTVKQLKEDYFKKIECFDSVEISGVEDRFNASLGTYHDLLKIIKDKDFLDNEENEDILEDIVLTLTLFEDREMIEERLKTYAHLFDDKVMKQLKRRRYTGWGRLSRKLINGIRDKQSGKTILDFLKSDGFANRNFMQLIHDDSLTFKEDIQKAQVSGQGDSLHEHIANLAGSPAIKKGILQTVKVVDELVKVMGRHKPENIVIEMARENQTTQKGQKNSRERMKRIEEGIKELGSQILKEHPVENTQLQNEKLYLYYLQNGRDMYVDQELDINRLSDYDVDHIVPQSFLKDDSIDNKVLTRSDKNRGKSDNVPSEEVVKKMKNYWRQLLNAKLITQRKFDNLTKAERGGLSELDKAGFIKRQLVETRQITKHVAQILDSRMNTKYDENDKLIREVKVITLKSKLVSDFRKDFQFYKVREINNYHHAHDAYLNAVVGTALIKKYPKLESEFVYGDYKVYDVRKMIAKSEQEIGKATAKYFFYSNIMNFFKTEITLANGEIRKRPLIETNGETGEIVWDKGRDFATVRKVLSMPQVNIVKKTEVQTGGFSKESILPKRNSDKLIARKKDWDPKKYGGFESPTVAYSVLVVAKVEKGKSKKLKSVKELLGITIMERSSFEKNPIDFLEAKGYKEVKKDLIIKLPKYSLFELENGRKRMLASAGELQKGNELALPSKYVNFLYLASHYEKLKGSPEDNEQKQLFVEQHKHYLDEIIEQISEFSKRVILADANLDKVLSAYNKHRDKPIREQAENIIHLFTLTNLGAPAAFKYFDTTIDRKQYRSTKEVLDATLIHQSITGLYETRIDLSQLGGD

SEQ ID NO: 250 - protein, 1368 aa, S. pyogenes
  MISC_FEATURE (1)..(1368): PAM-binding SpVQR Cas9 polypeptide sequence
MDKKYSIGLAIGTNSVGWAVITDEYKVPSKKFKVLGNTDRHSIKKNLIGALLFDSGETAEATRLKRTARRRYTRRKNRICYLQEIFSNEMAKVDDSFFHRLEESFLVEEDKKHERHPIFGNIVDEVAYHEKYPTIYHLRKKLVDSTDKADLRLIYLALAHMIKFRGHFLIEGDLNPDNSDVDKLFIQLVQTYNQLFEENPINASGVDAKAILSARLSKSRRLENLIAQLPGEKKNGLFGNLIALSLGLTPNFKSNFDLAEDAKLQLSKDTYDDDLDNLLAQIGDQYADLFLAAKNLSDAILLSDILRVNTEITKAPLSASMIKRYDEHHQDLTLLKALVRQQLPEKYKEIFFDQSKNGYAGYIDGGASQEEFYKFIKPILEKMDGTEELLVKLNREDLLRKQRTFDNGSIPHQIHLGELHAILRRQEDFYPFLKDNREKIEKILTFRIPYYVGPLARGNSRFAWMTRKSEETITPWNFEEVVDKGASAQSFIERMTNFDKNLPNEKVLPKHSLLYEYFTVYNELTKVKYVTEGMRKPAFLSGEQKKAIVDLLFKTNRKVTVKQLKEDYFKKIECFDSVEISGVEDRFNASLGTYHDLLKIIKDKDFLDNEENEDILEDIVLTLTLFEDREMIEERLKTYAHLFDDKVMKQLKRRRYTGWGRLSRKLINGIRDKQSGKTILDFLKSDGFANRNFMQLIHDDSLTFKEDIQKAQVSGQGDSLHEHIANLAGSPAIKKGILQTVKVVDELVKVMGRHKPENIVIEMARENQTTQKGQKNSRERMKRIEEGIKELGSQILKEHPVENTQLQNEKLYLYYLQNGRDMYVDQELDINRLSDYDVDHIVPQSFLKDDSIDNKVLTRSDKNRGKSDNVPSEEVVKKMKNYWRQLLNAKLITQRKFDNLTKAERGGLSELDKAGFIKRQLVETRQITKHVAQILDSRMNTKYDENDKLIREVKVITLKSKLVSDFRKDFQFYKVREINNYHHAHDAYLNAVVGTALIKKYPKLESEFVYGDYKVYDVRKMIAKSEQEIGKATAKYFFYSNIMNFFKTEITLANGEIRKRPLIETNGETGEIVWDKGRDFATVRKVLSMPQVNIVKKTEVQTGGFSKESILPKRNSDKLIARKKDWDPKKYGGFVSPTVAYSVLVVAKVEKGKSKKLKSVKELLGITIMERSSFEKNPIDFLEAKGYKEVKKDLIIKLPKYSLFELENGRKRMLASAGELQKGNELALPSKYVNFLYLASHYEKLKGSPEDNEQKQLFVEQHKHYLDEIIEQISEFSKRVILADANLDKVLSAYNKHRDKPIREQAENIIHLFTLTNLGAPAAFKYFDTTIDRKQYRSTKEVLDATLIHQSITGLYETRIDLSQLGGD

SEQ ID NO: 251 - protein, 1368 aa, S. pyogenes
  MISC_FEATURE (1)..(1368): SpVQR Cas9 polypeptide sequence
MDKKYSIGLAIGTNSVGWAVITDEYKVPSKKFKVLGNTDRHSIKKNLIGALLFDSGETAEATRLKRTARRRYTRRKNRICYLQEIFSNEMAKVDDSFFHRLEESFLVEEDKKHERHPIFGNIVDEVAYHEKYPTIYHLRKKLVDSTDKADLRLIYLALAHMIKFRGHFLIEGDLNPDNSDVDKLFIQLVQTYNQLFEENPINASGVDAKAILSARLSKSRRLENLIAQLPGEKKNGLFGNLIALSLGLTPNFKSNFDLAEDAKLQLSKDTYDDDLDNLLAQIGDQYADLFLAAKNLSDAILLSDILRVNTEITKAPLSASMIKRYDEHHQDLTLLKALVRQQLPEKYKEIFFDQSKNGYAGYIDGGASQEEFYKFIKPILEKMDGTEELLVKLNREDLLRKQRTFDNGSIPHQIHLGELHAILRRQEDFYPFLKDNREKIEKILTFRIPYYVGPLARGNSRFAWMTRKSEETITPWNFEEVVDKGASAQSFIERMTNFDKNLPNEKVLPKHSLLYEYFTVYNELTKVKYVTEGMRKPAFLSGEQKKAIVDLLFKTNRKVTVKQLKEDYFKKIECFDSVEISGVEDRFNASLGTYHDLLKIIKDKDFLDNEENEDILEDIVLTLTLFEDREMIEERLKTYAHLFDDKVMKQLKRRRYTGWGRLSRKLINGIRDKQSGKTILDFLKSDGFANRNFMQLIHDDSLTFKEDIQKAQVSGQGDSLHEHIANLAGSPAIKKGILQTVKVVDELVKVMGRHKPENIVIEMARENQTTQKGQKNSRERMKRIEEGIKELGSQILKEHPVENTQLQNEKLYLYYLQNGRDMYVDQELDINRLSDYDVDHIVPQSFLKDDSIDNKVLTRSDKNRGKSDNVPSEEVVKKMKNYWRQLLNAKLITQRKFDNLTKAERGGLSELDKAGFIKRQLVETRQITKHVAQILDSRMNTKYDENDKLIREVKVITLKSKLVSDFRKDFQFYKVREINNYHHAHDAYLNAVVGTALIKKYPKLESEFVYGDYKVYDVRKMIAKSEQEIGKATAKYFFYSNIMNFFKTEITLANGEIRKRPLIETNGETGEIVWDKGRDFATVRKVLSMPQVNIVKKTEVQTGGFSKESILPKRNSDKLIARKKDWDPKKYGGFVSPTVAYSVLVVAKVEKGKSKKLKSVKELLGITIMERSSFEKNPIDFLEAKGYKEVKKDLIIKLPKYSLFELENGRKRMLASARELQKGNELALPSKYVNFLYLASHYEKLKGSPEDNEQKQLFVEQHKHYLDEIIEQISEFSKRVILADANLDKVLSAYNKHRDKPIREQAENIIHLFTLTNLGAPAAFKYFDTTIDRKEYRSTKEVLDATLIHQSITGLYETRIDLSQLGGD

SEQ ID NO: 252 - protein, 1359 aa, Streptococcus macacae
  MISC_FEATURE (1)..(1359): SpyMacCas9 polypeptide sequence
MDKKYSIGLDIGTNSVGWAVITDDYKVPSKKFKVLGNTDRHSIKKNLIGALLFGSGETAEATRLKRTARRRYTRRKNRICYLQEIFSNEMAKVDDSFFHRLEESFLVEEDKKHERHPIFGNIVDEVAYHEKYPTIYHLRKKLADSTDKADLRLIYLALAHMIKFRGHFLIEGDLNPDNSDVDKLFIQLVQIYNQLFEENPINASRVDAKAILSARLSKSRRLENLIAQLPGEKRNGLFGNLIALSLGLTPNFKSNFDLAEDAKLQLSKDTYDDDLDNLLAQIGDQYADLFLAAKNLSDAILLSDILRVNSEITKAPLSASMIKRYDEHHQDLTLLKALVRQQLPEKYKEIFFDQSKNGYAGYIDGGASQEEFYKFIKPILEKMDGTEELLVKLNREDLLRKQRTFDNGSIPHQIHLGELHAILRRQEDFYPFLKDNREKIEKILTFRIPYYVGPLARGNSRFAWMTRKSEETITPWNFEEVVDKGASAQSFIERMTNFDKNLPNEKVLPKHSLLYEYFTVYNELTKVKYVTEGMRKPAFLSGEQKKAIVDLLFKTNRKVTVKQLKEDYFKKIECFDSVEISGVEDRFNASLGAYHDLLKIIKDKDFLDNEENEDILEDIVLTLTLFEDRGMIEERLKTYAHLFDDKVMKQLKRRRYTGWGRLSRKLINGIRDKQSGKTILDFLKSDGFANRNFMQLIHDDSLTFKEDIQKAQVSGQGHSLHEQIANLAGSPAIKKGILQTVKIVDELVKVMGHKPENIVIEMARENQTTQKGQKNSRERMKRIEEGIKELGSQILKEHPVENTQLQNEKLYLYYLQNGRDMYVDQELDINRLSDYDVDHIVPQSFIKDDSIDNKVLTRSDKNRGKSDNVPSEEVVKKMKNYWRQLLNAKLITQRKFDNLTKAERGGLSELDKAGFIKRQLVETRQITKHVAQILDSRMNTKYDENDKLIREVKVITLKSKLVSDFRKDFQFYKVREINNYHHAHDAYLNAVVGTALIKKYPKLESEFVYGDYKVYDVRKMIAKSEQEIGKATAKYFFYSNIMNFFKTEITLANGEIRKRPLIETNGETGEIVWDKGRDFATVRKVLSMPQVNIVKKTEIQTVGQNGGLFDDNPKSPLEVTPSKLVPLKKELNPKKYGGYQKPTTAYPVLLITDTKQLIPISVMNKKQFEQNPVKFLRDRGYQQVGKNDFIKLPKYTLVDIGDGIKRLWASSKEIHKGNQLVVSKKSQILLYHAHHLDSDLSNDYLQNHNQQFDVLFNEIISFSKKCKLGKEHIQKIENVYSNKKNSASIEELAESFIKLLGFTQLGATSPFNFLGVKLNQKQYKGKKDYILPCTEGTLIRQSITGLYETRVDLSKIGED

SEQ ID NO: 253 - protein, 1410 aa, Artificial Sequence
  Description of artificial sequence: CP5 polypeptide sequence
  MISC_FEATURE (1)..(341): Sequence derived from Cas9
  MISC_FEATURE (342)..(362): Linker sequence
  MISC_FEATURE (363)..(1388): Sequence derived from Cas9
  MISC_FEATURE (1389)..(1410): Bipartite nuclear localization sequence
EIGKATAKYFFYSNIMNFFKTEITLANGEIRKRPLIETNGETGEIVWDKGRDFATVRKVLSMPQVNIVKKTEVQTGGFSKESILPKRNSDKLIARKKDWDPKKYGGFMQPTVAYSVLVVAKVEKGKSKKLKSVKELLGITIMERSSFEKNPIDFLEAKGYKEVKKDLIIKLPKYSLFELENGRKRMLASAKFLQKGNELALPSKYVNFLYLASHYEKLKGSPEDNEQKQLFVEQHKHYLDEIIEQISEFSKRVILADANLDKVLSAYNKHRDKPIREQAENIIHLFTLTNLGAPRAFKYFDTTIARKEYRSTKEVLDATLIHQSITGLYETRIDLSQLGGDGGSGGSGGSGGSGGSGGSGGMDKKYSIGLAIGTNSVGWAVITDEYKVPSKKFKVLGNTDRHSIKKNLIGALLFDSGETAEATRLKRTARRRYTRRKNRICYLQEIFSNEMAKVDDSFFHRLEESFLVEEDKKHERHPIFGNIVDEVAYHEKYPTIYHLRKKLVDSTDKADLRLIYLALAHMIKFRGHFLIEGDLNPDNSDVDKLFIQLVQTYNQLFEENPINASGVDAKAILSARLSKSRRLENLIAQLPGEKKNGLFGNLIALSLGLTPNFKSNFDLAEDAKLQLSKDTYDDDLDNLLAQIGDQYADLFLAAKNLSDAILLSDILRVNTEITKAPLSASMIKRYDEHHQDLTLLKALVRQQLPEKYKEIFFDQSKNGYAGYIDGGASQEEFYKFIKPILEKMDGTEELLVKLNREDLLRKQRTFDNGSIPHQIHLGELHAILRRQEDFYPFLKDNREKIEKILTFRIPYYVGPLARGNSRFAWMTRKSEETITPWNFEEVVDKGASAQSFIERMTNFDKNLPNEKVLPKHSLLYEYFTVYNELTKVKYVTEGMRKPAFLSGEQKKAIVDLLFKTNRKVTVKQLKEDYFKKIECFDSVEISGVEDRFNASLGTYHDLLKIIKDKDFLDNEENEDILEDIVLTLTLFEDREMIEERLKTYAHLFDDKVMKQLKRRRYTGWGRLSRKLINGIRDKQSGKTILDFLKSDGFANRNFMQLIHDDSLTFKEDIQKAQVSGQGDSLHEHIANLAGSPAIKKGILQTVKVVDELVKVMGRHKPENIVIEMARENQTTQKGQKNSRERMKRIEEGIKELGSQILKEHPVENTQLQNEKLYLYYLQNGRDMYVDQELDINRLSDYDVDHIVPQSFLKDDSIDNKVLTRSDKNRGKSDNVPSEEVVKKMKNYWRQLLNAKLITQRKFDNLTKAERGGLSELDKAGFIKRQLVETRQITKHVAQILDSRMNTKYDENDKLIREVKVITLKSKLVSDFRKDFQFYKVREINNYHHAHDAYLNAVVGTALIKKYPKLESEFVYGDYKVYDVRKMIAKSEQEGADKRTADGSEFESPKKKRKV

SEQ ID NO: 254 - protein, 1302 aa, Artificial Sequence
  Description of artificial sequence: Cas12c1 polypeptide sequence
MQTKKTHLHLISAKASRKYRRTIACLSDTAKKDLERRKQSGAADPAQELSCLKTIKFKLEVPEGSKLPSFDRISQIYNALETIEKGSLSYLLFALILSGFRIFPNSSAAKTFASSSCYKNDQFASQIKEIFGEMVKNFIPSELESILKKGRRKNNKDWTEENIKRVLNSEFGRKNSEGSSALFDSFLSKFSQELFRKFDSWNEVNKKYLEAAELLDSMLASYGPFDSVCKMIGDSDSRNSLPDKSTIAFTNNAEITVDIESSVMPYMAIAALLREYRQSKSKAAPVAYVQSHLTTTNGNGLSWFFKFGLDLIRKAPVSSKQSTSDGSKSLQELFSVPDDKLDGLKFIKEACEALPEASLLCGEKGELLGYQDFRTSFAGHIDSWVANYVNRLFELIELVNQLPESIKLPSILTQKNHNLVASLGLQEAEVSHSLELFEGLVKNVRQTLKKLAGIDISSSPNEQDIKEFYAFSDVLNRLGSIRNQIENAVQTAKKDKIDLESAIEWKEWKKLKKLPKLNGLGGGVPKQQELLDKALESVKQIRHYQRIDFERVIQWAVNEHCLETVPKFLVDAEKKKINKESSTDFAAKENAVRFLLEGIGAAARGKTDSVSKAAYNWFVVNNFLAKKDLNRYFINCQGCIYKPPYSKRRSLAFALRSDNKDTIEVVWEKFETFYKEISKEIEKFNIFSQEFQTFLHLENLRMKLLLRRIQKPIPAEIAFFSLPQEYYDSLPPNVAFLALNQEITPSEYITQFNLYSSFLNGNLILLRRSRSYLRAKFSWVGNSKLIYAAKEARLWKIPNAYWKSDEWKMILDSNVLVFDKAGNVLPAPTLKKVCEREGDLRLFYPLLRQLPHDWCYRNPFVKSVGREKNVIEVNKEGEPKVASALPGSLFRLIGPAPFKSLLDDCFFNPLDKDLRECMLIVDQEISQKVEAQKVEASLESCTYSIAVPIRYHLEEPKVSNQFENVLAIDQGEAGLAYAVFSLKSIGEAETKPIAVGTIRIPSIRRLIHSVSTYRKKKQRLQNFKQNYDSTAFIMRENVTGDVCAKIVGLMKEFNAFPVLEYDVKNLESGSRQLSAVYKAVNSHFLYFKEPGRDALRKQLWYGGDSWTIDGIEIVTRERKEDGKEGVEKIVPLKVFPGRSVSARFTSKTCSCCGRNVFDWLFTEKKAKTNKKFNVNSKGELTTADGVIQLFEADRSKGPKFYARRKERTPLTKPIAKGSYSLEEIERRVRTNLRRAPKSKQSRDTSQSQYFCVYKDCALHFSGMQADENAAINIGRRFLTALRKNRRSDFPSNVKISDRLLDN

SEQ ID NO: 255 - protein, 1218 aa, Artificial Sequence
  Description of artificial sequence: Cas12c2 polypeptide sequence
MTKHSIPLHAFRNSGADARKWKGRIALLAKRGKETMRTLQFPLEMSEPEAAAINTTPFAVAYNAIEGTGKGTLFDYWAKLHLAGFRFFPSGGAATIFRQQAVFEDASWNAAFCQQSGKDWPWLVPSKLYERFTKAPREVAKKDGSKKSIEFTQENVANESHVSLVGASITDKTPEDQKEFFLKMAGALAEKFDSWKSANEDRIVAMKVIDEFLKSEGLHLPSLENIAVKCSVETKPDNATVAWHDAPMSGVQNLAIGVFATCASRIDNIYDLNGGKLSKLIQESATTPNVTALSWLFGKGLEYFRTTDIDTIMQDFNIPASAKESIKPLVESAQAIPTMTVLGKKNYAPFRPNFGGKIDSWIANYASRLMLLNDILEQIEPGFELPQALLDNETLMSGIDMTGDELKELIEAVYAWVDAAKQGLATLLGRGGNVDDAVQTFEQFSAMMDTLNGTLNTISARYVRAVEMAGKDEARLEKLIECKFDIPKWCKSVPKLVGISGGLPKVEEEIKVMNAAFKDVRARMFVRFEEIAAYVASKGAGMDVYDALEKRELEQIKKLKSAVPERAHIQAYRAVLHRIGRAVQNCSEKTKQLFSSKVIEMGVFKNPSHLNNFIFNQKGAIYRSPFDRSRHAPYQLHADKLLKNDWLELLAEISATLMASESTEQMEDALRLERTRLQLQLSGLPDWEYPASLAKPDIEVEIQTALKMQLAKDTVTSDVLQRAFNLYSSVLSGLTFKLLRRSFSLKMRFSVADTTQLIYVPKVCDWAIPKQYLQAEGEIGIAARVVTESSPAKMVTEVEMKEPKALGHFMQQAPHDWYFDASLGGTQVAGRIVEKGKEVGKERKLVGYRMRGNSAYKTVLDKSLVGNTELSQCSMIIEIPYTQTVDADFRAQVQAGLPKVSINLPVKETITASNKDEQMLFDRFVAIDLGERGLGYAVFDAKTLELQESGHRPIKAITNLLNRTHHYEQRPNQRQKFQAKFNVNLSELRENTVGDVCHQINRICAYYNAFPVLEYMVPDRLDKQLKSVYESVTNRYIWSSTDAHKSARVQFWLGGETWEHPYLKSAKDKKPLVLSPGRGASGKGTSQTCSCCGRNPFDLIKDMKPRAKIAVVDGKAKLENSELKLFERNLESKDDMLARRHRNERAGMEQPLTPGNYTVDEIKALLRANLRRAPKNRRTKDTTVSEYHCVFSDCGKTMHADENAAVNIGGKFIADIEK

SEQ ID NO: 256 - protein, 1252 aa, Oleiphilus sp. HI0009
  MISC_FEATURE (1)..(1252): OspCas12c polypeptide sequence
MTKLRHRQKKLTHDWAGSKKREVLGSNGKLQNPLLMPVKKGQVTEFRKAFSAYARATKGEMTDGRKNMFTHSFEPFKTKPSLHQCELADKAYQSLHSYLPGSLAHFLLSAHALGFRIFSKSGEATAFQASSKIEAYESKLASELACVDLSIQNLTISTLFNALTTSVRGKGEETSADPLIARFYTLLTGKPLSRDTQGPERDLAEVISRKIASSFGTWKEMTANPLQSLQFFEEELHALDANVSLSPAFDVLIKMNDLQGDLKNRTIVFDPDAPVFEYNAEDPADIIIKLTARYAKEAVIKNQNVGNYVKNAITTTNANGLGWLLNKGLSLLPVSTDDELLEFIGVERSHPSCHALIELIAQLEAPELFEKNVFSDTRSEVQGMIDSAVSNHIARLSSSRNSLSMDSEELERLIKSFQIHTPHCSLFIGAQSLSQQLESLPEALQSGVNSADILLGSTQYMLTNSLVEESIATYQRTLNRINYLSGVAGQINGAIKRKAIDGEKIHLPAAWSELISLPFIGQPVIDVESDLAHLKNQYQTLSNEFDTLISALQKNFDLNFNKALLNRTQHFEAMCRSTKKNALSKPEIVSYRDLLARLTSCLYRGSLVLRRAGIEVLKKHKIFESNSELREHVHERKHFVFVSPLDRKAKKLLRLTDSRPDLLHVIDEILQHDNLENKDRESLWLVRSGYLLAGLPDQLSSSFINLPIITQKGDRRLIDLIQYDQINRDAFVMLVTSAFKSNLSGLQYRANKQSFVVTRTLSPYLGSKLVYVPKDKDWLVPSQMFEGRFADILQSDYMVWKDAGRLCVIDTAKHLSNIKKSVFSSEEVLAFLRELPHRTFIQTEVRGLGVNVDGIAFNNGDIPSLKTFSNCVQVKVSRTNTSLVQTLNRWFEGGKVSPPSIQFERAYYKKDDQIHEDAAKRKIRFQMPATELVHASDDAGWTPSYLLGIDPGEYGMGLSLVSINNGEVLDSGFIHINSLINFASKKSNHQTKVVPRQQYKSPYANYLEQSKDSAAGDIAHILDRLIYKLNALPVFEALSGNSQSAADQVWTKVLSFYTWGDNDAQNSIRKQHWFGASHWDIKGMLRQPPTEKKPKPYIAFPGSQVSSYGNSQRCSCCGRNPIEQLREMAKDTSIKELKIRNSEIQLFDGTIKLFNPDPSTVIERRRHNLGPSRIPVADRTFKNISPSSLEFKELITIVSRSIRHSPEFIAKKRGIGSEYFCAYSDCNSSLNSEANAAANVAQKFQKQLFFEL

SEQ ID NO: 257 - protein, 767 aa, Artificial Sequence
  Description of artificial sequence: Cas12g1 polypeptide sequence
MAQASSTPAVSPRPRPRYREERTLVRKLLPRPGQSKQEFRENVKKLRKAFLQFNADVSGVCQWAIQFRPRYGKPAEPTETFWKFFLEPETSLPPNDSRSPEFRRLQAFEAAAGINGAAALDDPAFTNELRDSILAVASRPKTKEAQRLFSRLKDYQPAHRMILAKVAAEWIESRYRRAHQNWERNYEEWKKEKQEWEQNHPELTPEIREAFNQIFQQLEVKEKRVRICPAARLLQNKDNCQYAGKNKHSVLCNQFNEFKKNHLQGKAIKFFYKDAEKYLRCGLQSLKPNVQGPFREDWNKYLRYMNLKEETLRGKNGGRLPHCKNLGQECEFNPHTALCKQYQQQLSSRPDLVQHDELYRKWRREYWREPRKPVFRYPSVKRHSIAKIFGENYFQADFKNSVVGLRLDSMPAGQYLEFAFAPWPRNYRPQPGETEISSVHLHFVGTRPRIGFRFRVPHKRSRFDCTQEELDELRSRTFPRKAQDQKFLEAARKRLLETFPGNAEQELRLLAVDLGTDSARAAFFIGKTFQQAFPLKIVKIEKLYEQWPNQKQAGDRRDASSKQPRPGLSRDHVGRHLQKMRAQASEIAQKRQELTGTPAPETTTDQAAKKATLQPFDLRGLTVHTARMIRDWARLNARQIIQLAEENQVDLIVLESLRGFRPPGYENLDQEKKRRVAFFAHGRIRRKVTEKAVERGMRVVTVPYLASSKVCAECRKKQKDNKQWEKNKKRGLFKCEGCGSQAQVDENAARVLGRVFWGEIELPTAIP

SEQ ID NO: 258 - protein, 870 aa, Artificial Sequence
  Description of artificial sequence: Cas12h1 polypeptide sequence
MKVHEIPRSQLLKIKQYEGSFVEWYRDLQEDRKKFASLLFRWAAFGYAAREDDGATYISPSQALLERRLLLGDAEDVAIKFLDVLFKGGAPSSSCYSLFYEDFALRDKAKYSGAKREFIEGLATMPLDKIIERIRQDEQLSKIPAEEWLILGAEYSPEEIWEQVAPRIVNVDRSLGKQLRERLGIKCRRPHDAGYCKILMEVVARQLRSHNETYHEYLNQTHEMKTKVANNLTNEFDLVCEFAEVLEEKNYGLGWYVLWQGVKQALKEQKKPTKIQIAVDQLRQPKFAGLLTAKWRALKGAYDTWKLKKRLEKRKAFPYMPNWDNDYQIPVGLTGLGVFTLEVKRTEVVVDLKEHGKLFCSHSHYFGDLTAEKHPSRYHLKFRHKLKLRKRDSRVEPTIGPWIEAALREITIQKKPNGVFYLGLPYALSHGIDNFQIAKRFFSAAKPDKEVINGLPSEMVVGAADLNLSNIVAPVKARIGKGLEGPLHALDYGYGELIDGPKILTPDGPRCGELISLKRDIVEIKSAIKEFKACQREGLTMSEETTTWLSEVESPSDSPRCMIQSRIADTSRRLNSFKYQMNKEGYQDLAEALRLLDAMDSYNSLLESYQRMHLSPGEQSPKEAKFDTKRASFRDLLRRRVAHTIVEYFDDCDIVFFEDLDGPSDSDSRNNALVKLLSPRTLLLYIRQALEKRGIGMVEVAKDGTSQNNPISGHVGWRNKQNKSEIYFYEDKELLVMDADEVGAMNILCRGLNHSVCPYSFVTKAPEKKNDEKKEGDYGKRVKRFLKDRYGSSNVRFLVASMGFVTVTTKRPKDALVGKRLYYHGGELVTHDLHNRMKDEIKYLVEKEVLARRVSLSDSTIKSYKSFAHV

SEQ ID NO: 259 - protein, 1093 aa, Artificial Sequence
  Description of artificial sequence: Cas12i1 polypeptide sequence
MSNKEKNASETRKAYTTKMIPRSHDRMKLLGNFMDYLMDGTPIFFELWNQFGGGIDRDIISGTANKDKISDDLLLAVNWFKVMPINSKPQGVSPSNLANLFQQYSGSEPDIQAQEYFASNFDTEKHQWKDMRVEYERLLAELQLSRSDMHHDLKLMYKEKCIGLSLSTAHYITSVMFGTGAKNNRQTKHQFYSKVIQLLEESTQINSVEQLASIILKAGDCDSYRKLRIRCSRKGATPSILKIVQDYELGTNHDDEVNVPSLIANLKEKLGRFEYECEWKCMEKIKAFLASKVGPYYLGSYSAMLENALSPIKGMTTKNCKFVLKQIDAKNDIKYENEPFGKIVEGFFDSPYFESDTNVKWVLHPHHIGESNIKTLWEDLNAIHSKYEEDIASLSEDKKEKRIKVYQGDVCQTINTYCEEVGKEAKTPLVQLLRYLYSRKDDIAVDKIIDGITFLSKKHKVEKQKINPVIQKYPSFNFGNNSKLLGKIISPKDKLKHNLKCNRNQVDNYIWIEIKVLNTKTMRWEKHHYALSSTRFLEEVYYPATSENPPDALAARFRTKTNGYEGKPALSAEQIEQIRSAPVGLRKVKKRQMRLEAARQQNLLPRYTWGKDFNINICKRGNNFEVTLATKVKKKKEKNYKVVLGYDANIVRKNTYAAIEAHANGDGVIDYNDLPVKPIESGFVTVESQVRDKSYDQLSYNGVKLLYCKPHVESRRSFLEKYRNGTMKDNRGNNIQIDFMKDFEAIADDETSLYYFNMKYCKLLQSSIRNHSSQAKEYREEIFELLRDGKLSVLKLSSLSNLSFVMFKVAKSLIGTYFGHLLKKPKNSKSDVKAPPITDEDKQKADPEMFALRLALEEKRLNKVKSKKEVIANKIVAKALELRDKYGPVLIKGENISDTTKKGKKSSTNSFLMDWLARGVANKVKEMVMMHQGLEFVEVNPNFTSHQDPFVHKNPENTFRARYSRCTPSELTEKNRKEILSFLSDKPSKRPTNAYYNEGAMAFLATYGLKKNDVLGVSLEKFKQIMANILHQRSEDQLLFPSRGGMFYLATYKLDADATSVNWNGKQFWVCNADLVAAYNVGLVDIQKDFKKK

SEQ ID NO: 260 - protein, 1054 aa, Artificial Sequence
  Description of artificial sequence: Cas12i2 polypeptide sequence
MSSAIKSYKSVLRPNERKNQLLKSTIQCLEDGSAFFFKMLQGLFGGITPEIVRFSTEQEKQQQDIALWCAVNWFRPVSQDSLTHTIASDNLVEKFEEYYGGTASDAIKQYFSASIGESYYWNDCRQQYYDLCRELGVEVSDLTHDLEILCREKCLAVATESNQNNSIISVLFGTGEKEDRSVKLRITKKILEAISNLKEIPKNVAPIQEIILNVAKATKETFRQVYAGNLGAPSTLEKFIAKDGQKEFDLKKLQTDLKKVIRGKSKERDWCCQEELRSYVEQNTIQYDLWAWGEMFNKAHTALKIKSTRNYNFAKQRLEQFKEIQSLNNLLVVKKLNDFFDSEFFSGEETYTICVHHLGGKDLSKLYKAWEDDPADPENAIVVLCDDLKNNFKKEPIRNILRYIFTIRQECSAQDILAAAKYNQQLDRYKSQKANPSVLGNQGFTWTNAVILPEKAQRNDRPNSLDLRIWLYLKLRHPDGRWKKHHIPFYDTRFFQEIYAAGNSPVDTCQFRTPRFGYHLPKLTDQTAIRVNKKHVKAAKTEARIRLAIQQGTLPVSNLKITEISATINSKGQVRIPVKFDVGRQKGTLQIGDRFCGYDQNQTASHAYSLWEVVKEGQYHKELGCFVRFISSGDIVSITENRGNQFDQLSYEGLAYPQYADWRKKASKFVSLWQITKKNKKKEIVTVEAKEKFDAICKYQPRLYKFNKEYAYLLRDIVRGKSLVELQQIRQEIFRFIEQDCGVTRLGSLSLSTLETVKAVKGIIYSYFSTALNASKNNPISDEQRKEFDPELFALLEKLELIRTRKKKQKVERIANSLIQTCLENNIKFIRGEGDLSTTNNATKKKANSRSMDWLARGVFNKIRQLAPMHNITLFGCGSLYTSHQDPLVHRNPDKAMKCRWAAIPVKDIGDWVLRKLSQNLRAKNIGTGEYYHQGVKEFLSHYELQDLEEELLKWRSDRKSNIPCWVLQNRLAEKLGNKEAVVYIPVRGGRIYFATHKVATGAVSIVFDQKQVWVCNADHVAAANIALTVKGIGEQSSDEENPDGSRIKLQLTS

SEQ ID NO: 261 - protein, 4 aa, Artificial Sequence
  Description of artificial sequence: synthetic peptide sequence
GGGS

SEQ ID NO: 262 - protein, 5 aa, Artificial Sequence
  Description of artificial sequence: synthetic peptide sequence
GGGGS

SEQ ID NO: 263 - protein, 5 aa, Artificial Sequence
  Description of artificial sequence: synthetic peptide sequence
EAAAK

SEQ ID NO: 264 - protein, 16 aa, Artificial Sequence
  Description of artificial sequence: synthetic peptide sequence
SGSETPGTSESATPES

SEQ ID NO: 265 - protein, 6 aa, Artificial Sequence
  Description of artificial sequence: linker peptide sequence
GGSGGS

SEQ ID NO: 266 - protein, 20 aa, Artificial Sequence
  Description of artificial sequence: synthetic peptide sequence
GSSGSETPGTSESATPESSG

SEQ ID NO: 267 - DNA, 18 bp, Artificial Sequence
  Description of artificial sequence: synthetic oligonucleotide sequence
ggaggctctggaggaagc

SEQ ID NO: 268 - DNA, 60 bp, Artificial Sequence
  Description of artificial sequence: synthetic oligonucleotide sequence
ggctcttctggatctgaaacacctggcacaagcgagagcgccacccctgagagctctggc

SEQ ID NO: 269 - protein, 1129 aa, Alicyclobacillus acidiphilus
  MISC_FEATURE (1)..(1129): AacCas12b polypeptide sequence
MAVKSMKVKLRLDNMPEIRAGLWKLHTEVNAGVRYYTEWLSLLRQENLYRRSPNGDGEQECYKTAEECKAELLERLRARQVENGHCGPAGSDDELLQLARQLYELLVPQAIGAKGDAQQIARKFLSPLADKDAVGGLGIAKAGNKPRWVRMREAGEPGWEEEKAKAEARKSTDRTADVLRALADFGLKPLMRVYTDSDMSSVQWKPLRKGQAVRTWDRDMFQQAIERMMSWESWNQRVGEAYAKLVEQKSRFEQKNFVGQEHLVQLVNQLQQDMKEASHGLESKEQTAHYLTGRALRGSDKVFEKWEKLDPDAPFDLYDTEIKNVQRRNTRRFGSHDLFAKLAEPKYQALWREDASFLTRYAVYNSIVRKLNHAKMFATFTLPDATAHPIWTRFDKLGGNLHQYTFLFNEFGEGRHAIRFQKLLTVEDGVAKEVDDVTVPISMSAQLDDLLPRDPHELVALYFQDYGAEQHLAGEFGGAKIQYRRDQLNHLHARRGARDVYLNLSVRVQSQSEARGERRPPYAAVFRLVGDNHRAFVHFDKLSDYLAEHPDDGKLGSEGLLSGLRVMSVDLGLRTSASISVFRVARKDELKPNSEGRVPFCFPIEGNENLVAVHERSQLLKLPGETESKDLRAIREERQRTLRQLRTQLAYLRLLVRCGSEDVGRRERSWAKLIEQPMDANQMTPDWREAFEDELQKLKSLYGICGDREWTEAVYESVRRVWRHMGKQVRDWRKDVRSGERPKIRGYQKDVVGGNSIEQIEYLERQYKFLKSWSFFGKVSGQVIRAEKGSRFAITLREHIDHAKEDRLKKLADRIIMEALGYVYALDDERGKGKWVAKYPPCQLILLEELSEYQFNNDRPPSENNQLMQWSHRGVFQELLNQAQVHDLLVGTMYAAFSSRFDARTGAPGIRCRRVPARCAREQNPEPFPWWLNKFVAEHKLDGCPLRADDLIPTGEGEFFVSPFSAEEGDFHQIHADLNAAQNLQRRLWSDFDISQIRLRCDWGEVDGEPVLIPRTTGKRTADSYGNKVFYTKTGVTYYERERGKKRRKVFAQEELSEEEAELLVEADEAREKSVVLMRDPSGIINRGDWTRQKEFWSMVNQRIEGYLVKQIRSRVRLQESACENTGDI

SEQ ID NO: 270 - protein, 1140 aa, Bacillus hisashii
  MISC_FEATURE (1)..(1140): BhCas12b polypeptide sequence
MAPKKKRKVGIHGVPAAATRSFILKIEPNEEVKKGLWKTHEVLNHGIAYYMNILKLIRQEAIYEHHEQDPKNPKKVSKAEIQAELWDFVLKMQKCNSFTHEVDKDEVFNILRELYEELVPSSVEKKGEANQLSNKFLYPLVDPNSQSGKGTASSGRKPRWYNLKIAGDPSWEEEKKKWEEDKKKDPLAKILGKLAEYGLIPLFIPYTDSNEPIVKEIKWMEKSRNQSVRRLDKDMFIQALERFLSWESWNLKVKEEYEKVEKEYKTLEERIKEDIQALKALEQYEKERQEQLLRDTLNTNEYRLSKRGLRGWREIIQKWLKMDENEPSEKYLEVFKDYQRKHPREAGDYSVYEFLSKKENHFIWRNHPEYPYLYATFCEIDKKKKDAKQQATFTLADPINHPLWVRFEERSGSNLNKYRILTEQLHTEKLKKKLTVQLDRLIYPTESGGWEEKGKVDIVLLPSRQFYNQIFLDIEEKGKHAFTYKDESIKFPLKGTLGGARVQFDRDHLRRYPHKVESGNVGRIYFNMTVNIEPTESPVSKSLKIHRDDFPKVVNFKPKELTEWIKDSKGKKLKSGIESLEIGLRVMSIDLGQRQAAAASIFEVVDQKPDIEGKLFFPIKGTELYAVHRASFNIKLPGETLVKSREVLRKAREDNLKLMNQKLNFLRNVLHFQQFEDITEREKRVTKWISRQENSDVPLVYQDELIQIRELMYKPYKDWVAFLKQLHKRLEVEIGKEVKHWRKSLSDGRKGLYGISLKNIDEIDRTRKFLLRWSLRPTEPGEVRRLEPGQRFAIDQLNHLNALKEDRLKKMANTIIMHALGYCYDVRKKKWQAKNPACQIILFEDLSNYNPYEERSRFENSKLMKWSRREIPRQVALQGEIYGLQVGEVGAQFSSRFHAKTGSPGIRCSVVTKEKLQDNRFFKNLQREGRLTLDKIAVLKEGDLYPDKGGEKFISLSKDRKCVTTHADINAAQNLQKRFWTRTHGFYKVYCKAYQVDGQTVYIPESKDQKQKIIEEFGEGYFILKDGVYEWVNAGKLKIKKGSSKQSSSELVDSDILKDSFDLASELKGEKLMLYRDPSGNVFPSDKWMAAGVFFGKLERILISKLTNQYSISTIEDDSSKQSMKRPAATKKAGQAKKKK

SEQ ID NO: 271 - protein, 1108 aa, Bacillus thermoamylovorans
  MISC_FEATURE (1)..(1108): BTCas12b.BTCas12b polypeptide sequence
MATRSFILKIEPNEEVKKGLWKTHEVLNHGIAYYMNILKLIRQEAIYEHHEQDPKNPKKVSKAEIQAELWDFVLKMQKCNSFTHEVDKDVVFNILRELYEELVPSSVEKKGEANQLSNKFLYPLVDPNSQSGKGTASSGRKPRWYNLKIAGDPSWEEEKKKWEEDKKKDPLAKILGKLAEYGLIPLFIPFTDSNEPIVKEIKWMEKSRNQSVRRLDKDMFIQALERFLSWESWNLKVKEEYEKVEKEHKTLEERIKEDIQAFKSLEQYEKERQEQLLRDTLNTNEYRLSKRGLRGWREIIQKWLKMDENEPSEKYLEVFKDYQRKHPREAGDYSVYEFLSKKENHFIWRNHPEYPYLYATFCEIDKKKKDAKQQATFTLADPINHPLWVRFEERSGSNLNKYRILTEQLHTEKLKKKLTVQLDRLIYPTESGGWEEKGKVDIVLLPSRQFYNQIFLDIEEKGKHAFTYKDESIKFPLKGTLGGARVQFDRDHLRRYPHKVESGNVGRIYFNMTVNIEPTESPVSKSLKIHRDDFPKFVNFKPKELTEWIKDSKGKKLKSGIESLEIGLRVMSIDLGQRQAAAASIFEVVDQKPDIEGKLFFPIKGTELYAVHRASFNIKLPGETLVKSREVLRKAREDNLKLMNQKLNFLRNVLHFQQFEDITEREKRVTKWISRQENSDVPLVYQDELIQIRELMYKPYKDWVAFLKQLHKRLEVEIGKEVKHWRKSLSDGRKGLYGISLKNIDEIDRTRKFLLRWSLRPTEPGEVRRLEPGQRFAIDQLNHLNALKEDRLKKMANTIIMHALGYCYDVRKKKWQAKNPACQIILFEDLSNYNPYEERSRFENSKLMKWSRREIPRQVALQGEIYGLQVGEVGAQFSSRFHAKTGSPGIRCSVVTKEKLQDNRFFKNLQREGRLTLDKIAVLKEGDLYPDKGGEKFISLSKDRKLVTTHADINAAQNLQKRFWTRTHGFYKVYCKAYQVDGQTVYIPESKDQKQKIIEEFGEGYFILKDGVYEWGNAGKLKIKKGSSKQSSSELVDSDILKDSFDLASELKGEKLMLYRDPSGNVFPSDKWMAAGVFFGKLERILISKLTNQYSISTIEDDSSKQSM

SEQ ID NO: 272 - protein, 1112 aa, Bacillus sp. V3-13
  MISC_FEATURE (1)..(1112): BvCas12b (Bacillus sp. V3-13) polypeptide sequence
MAIRSIKLKMKTNSGTDSIYLRKALWRTHQLINEGIAYYMNLLTLYRQEAIGDKTKEAYQAELINIIRNQQRNNGSSEEHGSDQEILALLRQLYELIIPSSIGESGDANQLGNKFLYPLVDPNSQSGKGTSNAGRKPRWKRLKEEGNPDWELEKKKDEERKAKDPTVKIFDNLNKYGLLPLFPLFTNIQKDIEWLPLGKRQSVRKWDKDMFIQAIERLLSWESWNRRVADEYKQLKEKTESYYKEHLTGGEEWIEKIRKFEKERNMELEKNAFAPNDGYFITSRQIRGWDRVYEKWSKLPESASPEELWKVVAEQQNKMSEGFGDPKVFSFLANRENRDIWRGHSERIYHIAAYNGLQKKLSRTKEQATFTLPDAIEHPLWIRYESPGGTNLNLFKLEEKQKKNYYVTLSKIIWPSEEKWIEKENIEIPLAPSIQFNRQIKLKQHVKGKQEISFSDYSSRISLDGVLGGSRIQFNRKYIKNHKELLGEGDIGPVFFNLVVDVAPLQETRNGRLQSPIGKALKVISSDFSKVIDYKPKELMDWMNTGSASNSFGVASLLEGMRVMSIDMGQRTSASVSIFEVVKELPKDQEQKLFYSINDTELFAIHKRSFLLNLPGEVVTKNNKQQRQERRKKRQFVRSQIRMLANVLRLETKKTPDERKKAIHKLMEIVQSYDSWTASQKEVWEKELNLLTNMAAFNDEIWKESLVELHHRIEPYVGQIVSKWRKGLSEGRKNLAGISMWNIDELEDTRRLLISWSKRSRTPGEANRIETDEPFGSSLLQHIQNVKDDRLKQMANLIIMTALGFKYDKEEKDRYKRWKETYPACQIILFENLNRYLFNLDRSRRENSRLMKWAHRSIPRTVSMQGEMFGLQVGDVRSEYSSRFHAKTGAPGIRCHALTEEDLKAGSNTLKRLIEDGFINESELAYLKKGDIIPSQGGELFVTLSKRYKKDSDNNELTVIHADINAAQNLQKRFWQQNSEVYRVPCQLARMGEDKLYIPKSQTETIKKYFGKGSFVKNNTEQEVYKWEKSEKMKIKTDTTFDLQDLDGFEDISKTIELAQEQQKKYLTMFRDPSGYFFNNETWRPQKEYWSIVNNIIKSCLKKKILSNKVEL

SEQ ID NO: 273 - DNA, 47 bp, Artificial Sequence
  Description of artificial sequence: 5'UTR oligonucleotide sequence
gggaaataagagagaaaagaagagtaagaagaaatataagagccacc

SEQ ID NO: 274 - DNA, 101 bp, Artificial Sequence
  Description of artificial sequence: 3'UTR (TriLink standard UTR) polynucleotide sequence
gctggagcctcggtggccatgcttcttgccccttgggcctccccccagcccctcctccccttcctgcacccgtacccccgtggtctttgaataaagtctga

SEQ ID NO: 275 - DNA, 3420 bp, Bacillus hisashii
  misc_feature (1)..(3420): bhCas12b (V4) polynucleotide sequence
atggccccaaagaagaagcggaaggtcggtatccacggagtcccagcagccgccaccagatccttcatcctgaagatcgagcccaacgaggaagtgaagaaaggcctctggaaaacccacgaggtgctgaaccacggaatcgcctactacatgaatatcctgaagctgatccggcaagaggccatctacgagcaccacgagcaggaccccaagaatcccaagaaggtgtccaaggccgagatccaggccgagctgtgggatttcgtgctgaagatgcagaagtgcaacagcttcacacacgaggtggacaaggacgaggtgttcaacatcctgagagagctgtacgaggaactggtgcccagcagcgtggaaaagaagggcgaagccaaccagctgagcaacaagtttctgtaccctctggtggaccccaacagccagtctggaaagggaacagccagcagcggcagaaagcccagatggtacaacctgaagattgccggcgatccctcctgggaagaagagaagaagaagtgggaagaagataagaaaaaggacccgctggccaagatcctgggcaagctggctgagtacggactgatccctctgttcatcccctacaccgacagcaacgagcccatcgtgaaagaaatcaagtggatggaaaagtcccggaaccagagcgtgcggcggctggataaggacatgttcattcaggccctggaacggttcctgagctgggagagctggaacctgaaagtgaaagaggaatacgagaaggtcgagaaagagtacaagaccctggaagagaggatcaaagaggacatccaggctctgaaggctctggaacagtatgagaaagagcggcaagaacagctgctgcgggacaccctgaacaccaacgagtaccggctgagcaagagaggccttagaggctggcgggaaatcatccagaaatggctgaaaatggacgagaacgagccctccgagaagtacctggaagtgttcaaggactaccagcggaagcaccctagagaggccggcgattacagcgtgtacgagttcctgtccaagaaagagaaccacttcatctggcggaatcaccctgagtacccctacctgtacgccaccttctgcgagatcgacaagaaaaagaaggacgccaagcagcaggccaccttcacactggccgatcctatcaatcaccctctgtgggtccgattcgaggaaagaagcggcagcaacctgaacaagtacagaatcctgaccgagcagctgcacaccgagaagctgaagaaaaagctgacagtgcagctggaccggctgatctaccctacagaatctggcggctgggaagagaagggcaaagtggacattgtgctgctgcccagccggcagttctacaaccagatcttcctggacatcgaggaaaagggcaagcacgccttcacctacaaggatgagagcatcaagttccctctgaagggcacactcggcggagccagagtgcagttcgacagagatcacctgagaagataccctcacaaggtggaaagcggcaacgtgggcagaatctacttcaacatgaccgtgaacatcgagcctacagagtccccagtgtccaagtctctgaagatccaccgggacgacttccccaaggtggtcaacttcaagcccaaagaactgaccgagtggatcaaggacagcaagggcaagaaactgaagtccggcatcgagtccctggaaatcggcctgagagtgatgagcatcgacctgggacagagacaggccgctgccgcctctattttcgaggtggtggatcagaagcccgacatcgaaggcaagctgtttttcccaatcaagggcaccgagctgtatgccgtgcacagagccagcttcaacatcaagctgcccggcgagacactggtcaagagcagagaagtgctgcggaaggccagagaggacaatctgaaactgatgaaccagaagctcaacttcctgcggaacgtgctgcacttccagcagttcgaggacatcaccgagagagagaagcgggtcaccaagtggatcagcagacaagagaacagcgacgtgcccctggtgtaccaggatgagctgatccagatccgcgagctgatgtacaagccttacaaggactgggtcgccttcctgaagcagctccacaagagactggaagtcgagatcggcaaagaagtgaagcactggcggaagtccctgagcgacggaagaaagggcctgtacggcatctccctgaagaacatcgacgagatcgatcggacccggaagttcctgctgagatggtccctgaggcctaccgaacctggcgaagtgcgtagactggaacccggccagagattcgccatcgaccagctgaatcacctgaacgccctgaaagaagatcggctgaagaagatggccaacaccatcatcatgcacgccctgggctactgctacgacgtgcggaagaagaaatggcaggctaagaaccccgcctgccagatcatcctgttcgaggatctgagcaactacaacccctacgaggaaaggtcccgcttcgagaacagcaagctcatgaagtggtccagacgcgagatccccagacaggttgcactgcagggcgagatctatggcctgcaagtgggagaagtgggcgctcagttcagcagcagattccacgccaagacaggcagccctggcatcagatgtagcgtcgtgaccaaagagaagctgcaggacaatcggttcttcaagaatctgcagagagagggcagactgaccctggacaaaatcgccgtgctgaaagagggcgatctgtacccagacaaaggcggcgagaagttcatcagcctgagcaaggatcggaagtgcgtgaccacacacgccgacatcaacgccgctcagaacctgcagaagcggttctggacaagaacccacggcttctacaaggtgtactgcaaggcctaccaggtggacggccagaccgtgtacatccctgagagcaaggaccagaagcagaagatcatcgaagagttcggcgagggctacttcattctgaaggacggggtgtacgaatgggtcaacgccggcaagctgaaaatcaagaagggcagctccaagcagagcagcagcgagctggtggatagcgacatcctgaaagacagcttcgacctggcctccgagctgaaaggcgaaaagctgatgctgtacagggaccccagcggcaatgtgttccccagcgacaaatggatggccgctggcgtgttcttcggaaagctggaacgcatcctgatcagcaagctgaccaaccagtactccatcagcaccatcgaggacgacagcagcaagcagtctatgaaaaggccggcggccacgaaaaaggccggccaggcaaaaaagaaaaag

SEQ ID NO: 276 - protein, 17 aa, Artificial Sequence
  Description of artificial sequence: synthetic peptide sequence
MAPKKKRKVGIHGVPAA

SEQ ID NO: 277 - DNA, 51 bp, Artificial Sequence
  Description of artificial sequence: synthetic oligonucleotide sequence
atggccccaaagaagaagcggaaggtcggtatccacggagtcccagcagcc

SEQ ID NO: 278 - protein, 1554 aa, Artificial Sequence
  Description of artificial sequence: 101 Cas9 TadAins 1015 polypeptide sequence
MDKKYSIGLAIGTNSVGWAVITDEYKVPSKKFKVLGNTDRHSIKKNLIGALLFDSGETAEATRLKRTARRRYTRRKNRICYLQEIFSNEMAKVDDSFFHRLEESFLVEEDKKHERHPIFGNIVDEVAYHEKYPTIYHLRKKLVDSTDKADLRLIYLALAHMIKFRGHFLIEGDLNPDNSDVDKLFIQLVQTYNQLFEENPINASGVDAKAILSARLSKSRRLENLIAQLPGEKKNGLFGNLIALSLGLTPNFKSNFDLAEDAKLQLSKDTYDDDLDNLLAQIGDQYADLFLAAKNLSDAILLSDILRVNTEITKAPLSASMIKRYDEHHQDLTLLKALVRQQLPEKYKEIFFDQSKNGYAGYIDGGASQEEFYKFIKPILEKMDGTEELLVKLNREDLLRKQRTFDNGSIPHQIHLGELHAILRRQEDFYPFLKDNREKIEKILTFRIPYYVGPLARGNSRFAWMTRKSEETITPWNFEEVVDKGASAQSFIERMTNFDKNLPNEKVLPKHSLLYEYFTVYNELTKVKYVTEGMRKPAFLSGEQKKAIVDLLFKTNRKVTVKQLKEDYFKKIECFDSVEISGVEDRFNASLGTYHDLLKIIKDKDFLDNEENEDILEDIVLTLTLFEDREMIEERLKTYAHLFDDKVMKQLKRRRYTGWGRLSRKLINGIRDKQSGKTILDFLKSDGFANRNFMQLIHDDSLTFKEDIQKAQVSGQGDSLHEHIANLAGSPAIKKGILQTVKVVDELVKVMGRHKPENIVIEMARENQTTQKGQKNSRERMKRIEEGIKELGSQILKEHPVENTQLQNEKLYLYYLQNGRDMYVDQELDINRLSDYDVDHIVPQSFLKDDSIDNKVLTRSDKNRGKSDNVPSEEVVKKMKNYWRQLLNAKLITQRKFDNLTKAERGGLSELDKAGFIKRQLVETRQITKHVAQILDSRMNTKYDENDKLIREVKVITLKSKLVSDFRKDFQFYKVREINNYHHAHDAYLNAVVGTALIKKYPKLESEFVYGDYKVGSSGSETPGTSESATPESSGSEVEFSHEYWMRHALTLAKRARDEREVPVGAVLVLNNRVIGEGWNRAIGLHDPTAHAEIMALRQGGLVMQNYRLIDATLYVTFEPCVMCAGAMIHSRIGRVVFGVRNAKTGAAGSLMDVLHYPGMNHRVEITEGILADECAALLCYFFRMPRQVFNAQKKAQSSTDYDVRKMIAKSEQEIGKATAKYFFYSNIMNFFKTEITLANGEIRKRPLIETNGETGEIVWDKGRDFATVRKVLSMPQVNIVKKTEVQTGGFSKESILPKRNSDKLIARKKDWDPKKYGGFDSPTVAYSVLVVAKVEKGKSKKLKSVKELLGITIMERSSFEKNPIDFLEAKGYKEVKKDLIIKLPKYSLFELENGRKRMLASAGELQKGNELALPSKYVNFLYLASHYEKLKGSPEDNEQKQLFVEQHKHYLDEIIEQISEFSKRVILADANLDKVLSAYNKHRDKPIREQAENIIHLFTLTNLGAPAAFKYFDTTIDRKRYTSTKEVLDATLIHQSITGLYETRIDLSQLGGD

SEQ ID NO: 279 - protein, 1554 aa, Artificial Sequence
  Description of artificial sequence: 102 Cas9 TadAins 1022 polypeptide sequence
MDKKYSIGLAIGTNSVGWAVITDEYKVPSKKFKVLGNTDRHSIKKNLIGALLFDSGETAEATRLKRTARRRYTRRKNRICYLQEIFSNEMAKVDDSFFHRLEESFLVEEDKKHERHPIFGNIVDEVAYHEKYPTIYHLRKKLVDSTDKADLRLIYLALAHMIKFRGHFLIEGDLNPDNSDVDKLFIQLVQTYNQLFEENPINASGVDAKAILSARLSKSRRLENLIAQLPGEKKNGLFGNLIALSLGLTPNFKSNFDLAEDAKLQLSKDTYDDDLDNLLAQIGDQYADLFLAAKNLSDAILLSDILRVNTEITKAPLSASMIKRYDEHHQDLTLLKALVRQQLPEKYKEIFFDQSKNGYAGYIDGGASQEEFYKFIKPILEKMDGTEELLVKLNREDLLRKQRTFDNGSIPHQIHLGELHAILRRQEDFYPFLKDNREKIEKILTFRIPYYVGPLARGNSRFAWMTRKSEETITPWNFEEVVDKGASAQSFIERMTNFDKNLPNEKVLPKHSLLYEYFTVYNELTKVKYVTEGMRKPAFLSGEQKKAIVDLLFKTNRKVTVKQLKEDYFKKIECFDSVEISGVEDRFNASLGTYHDLLKIIKDKDFLDNEENEDILEDIVLTLTLFEDREMIEERLKTYAHLFDDKVMKQLKRRRYTGWGRLSRKLINGIRDKQSGKTILDFLKSDGFANRNFMQLIHDDSLTFKEDIQKAQVSGQGDSLHEHIANLAGSPAIKKGILQTVKVVDELVKVMGRHKPENIVIEMARENQTTQKGQKNSRERMKRIEEGIKELGSQILKEHPVENTQLQNEKLYLYYLQNGRDMYVDQELDINRLSDYDVDHIVPQSFLKDDSIDNKVLTRSDKNRGKSDNVPSEEVVKKMKNYWRQLLNAKLITQRKFDNLTKAERGGLSELDKAGFIKRQLVETRQITKHVAQILDSRMNTKYDENDKLIREVKVITLKSKLVSDFRKDFQFYKVREINNYHHAHDAYLNAVVGTALIKKYPKLESEFVYGDYKVYDVRKMIGSSGSETPGTSESATPESSGSEVEFSHEYWMRHALTLAKRARDEREVPVGAVLVLNNRVIGEGWNRAIGLHDPTAHAEIMALRQGGLVMQNYRLIDATLYVTFEPCVMCAGAMIHSRIGRVVFGVRNAKTGAAGSLMDVLHYPGMNHRVEITEGILADECAALLCYFFRMPRQVFNAQKKAQSSTDAKSEQEIGKATAKYFFYSNIMNFFKTEITLANGEIRKRPLIETNGETGEIVWDKGRDFATVRKVLSMPQVNIVKKTEVQTGGFSKESILPKRNSDKLIARKKDWDPKKYGGFDSPTVAYSVLVVAKVEKGKSKKLKSVKELLGITIMERSSFEKNPIDFLEAKGYKEVKKDLIIKLPKYSLFELENGRKRMLASAGELQKGNELALPSKYVNFLYLASHYEKLKGSPEDNEQKQLFVEQHKHYLDEIIEQISEFSKRVILADANLDKVLSAYNKHRDKPIREQAENIIHLFTLTNLGAPAAFKYFDTTIDRKRYTSTKEVLDATLIHQSITGLYETRIDLSQLGGD

SEQ ID NO: 280 - protein, 1554 aa, Artificial Sequence
  Description of artificial sequence: 103 Cas9 TadAins 1029 polypeptide sequence
MDKKYSIGLAIGTNSVGWAVITDEYKVPSKKFKVLGNTDRHSIKKNLIGALLFDSGETAEATRLKRTARRRYTRRKNRICYLQEIFSNEMAKVDDSFFHRLEESFLVEEDKKHERHPIFGNIVDEVAYHEKYPTIYHLRKKLVDSTDKADLRLIYLALAHMIKFRGHFLIEGDLNPDNSDVDKLFIQLVQTYNQLFEENPINASGVDAKAILSARLSKSRRLENLIAQLPGEKKNGLFGNLIALSLGLTPNFKSNFDLAEDAKLQLSKDTYDDDLDNLLAQIGDQYADLFLAAKNLSDAILLSDILRVNTEITKAPLSASMIKRYDEHHQDLTLLKALVRQQLPEKYKEIFFDQSKNGYAGYIDGGASQEEFYKFIKPILEKMDGTEELLVKLNREDLLRKQRTFDNGSIPHQIHLGELHAILRRQEDFYPFLKDNREKIEKILTFRIPYYVGPLARGNSRFAWMTRKSEETITPWNFEEVVDKGASAQSFIERMTNFDKNLPNEKVLPKHSLLYEYFTVYNELTKVKYVTEGMRKPAFLSGEQKKAIVDLLFKTNRKVTVKQLKEDYFKKIECFDSVEISGVEDRFNASLGTYHDLLKIIKDKDFLDNEENEDILEDIVLTLTLFEDREMIEERLKTYAHLFDDKVMKQLKRRRYTGWGRLSRKLINGIRDKQSGKTILDFLKSDGFANRNFMQLIHDDSLTFKEDIQKAQVSGQGDSLHEHIANLAGSPAIKKGILQTVKVVDELVKVMGRHKPENIVIEMARENQTTQKGQKNSRERMKRIEEGIKELGSQILKEHPVENTQLQNEKLYLYYLQNGRDMYVDQELDINRLSDYDVDHIVPQSFLKDDSIDNKVLTRSDKNRGKSDNVPSEEVVKKMKNYWRQLLNAKLITQRKFDNLTKAERGGLSELDKAGFIKRQLVETRQITKHVAQILDSRMNTKYDENDKLIREVKVITLKSKLVSDFRKDFQFYKVREINNYHHAHDAYLNAVVGTALIKKYPKLESEFVYGDYKVYDVRKMIAKSEQEIGSSGSETPGTSESATPESSGSEVEFSHEYWMRHALTLAKRARDEREVPVGAVLVLNNRVIGEGWNRAIGLHDPTAHAEIMALRQGGLVMQNYRLIDATLYVTFEPCVMCAGAMIHSRIGRVVFGVRNAKTGAAGSLMDVLHYPGMNHRVEITEGILADECAALLCYFFRMPRQVFNAQKKAQSSTDGKATAKYFFYSNIMNFFKTEITLANGEIRKRPLIETNGETGEIVWDKGRDFATVRKVLSMPQVNIVKKTEVQTGGFSKESILPKRNSDKLIARKKDWDPKKYGGFDSPTVAYSVLVVAKVEKGKSKKLKSVKELLGITIMERSSFEKNPIDFLEAKGYKEVKKDLIIKLPKYSLFELENGRKRMLASAGELQKGNELALPSKYVNFLYLASHYEKLKGSPEDNEQKQLFVEQHKHYLDEIIEQISEFSKRVILADANLDKVLSAYNKHRDKPIREQAENIIHLFTLTNLGAPAAFKYFDTTIDRKRYTSTKEVLDATLIHQSITGLYETRIDLSQLGGD

SEQ ID NO: 281 - protein, 1554 aa, Artificial Sequence
  Description of artificial sequence: 103 Cas9 TadAins 1040 polypeptide sequence
MDKKYSIGLAIGTNSVGWAVITDEYKVPSKKFKVLGNTDRHSIKKNLIGALLFDSGETAEATRLKRTARRRYTRRKNRICYLQEIFSNEMAKVDDSFFHRLEESFLVEEDKKHERHPIFGNIVDEVAYHEKYPTIYHLRKKLVDSTDKADLRLIYLALAHMIKFRGHFLIEGDLNPDNSDVDKLFIQLVQTYNQLFEENPINASGVDAKAILSARLSKSRRLENLIAQLPGEKKNGLFGNLIALSLGLTPNFKSNFDLAEDAKLQLSKDTYDDDLDNLLAQIGDQYADLFLAAKNLSDAILLSDILRVNTEITKAPLSASMIKRYDEHHQDLTLLKALVRQQLPEKYKEIFFDQSKNGYAGYIDGGASQEEFYKFIKPILEKMDGTEELLVKLNREDLLRKQRTFDNGSIPHQIHLGELHAILRRQEDFYPFLKDNREKIEKILTFRIPYYVGPLARGNSRFAWMTRKSEETITPWNFEEVVDKGASAQSFIERMTNFDKNLPNEKVLPKHSLLYEYFTVYNELTKVKYVTEGMRKPAFLSGEQKKAIVDLLFKTNRKVTVKQLKEDYFKKIECFDSVEISGVEDRFNASLGTYHDLLKIIKDKDFLDNEENEDILEDIVLTLTLFEDREMIEERLKTYAHLFDDKVMKQLKRRRYTGWGRLSRKLINGIRDKQSGKTILDFLKSDGFANRNFMQLIHDDSLTFKEDIQKAQVSGQGDSLHEHIANLAGSPAIKKGILQTVKVVDELVKVMGRHKPENIVIEMARENQTTQKGQKNSRERMKRIEEGIKELGSQILKEHPVENTQLQNEKLYLYYLQNGRDMYVDQELDINRLSDYDVDHIVPQSFLKDDSIDNKVLTRSDKNRGKSDNVPSEEVVKKMKNYWRQLLNAKLITQRKFDNLTKAERGGLSELDKAGFIKRQLVETRQITKHVAQILDSRMNTKYDENDKLIREVKVITLKSKLVSDFRKDFQFYKVREINNYHHAHDAYLNAVVGTALIKKYPKLESEFVYGDYKVYDVRKMIAKSEQEIGKATAKYFFYSGSSGSETPGTSESATPESSGSEVEFSHEYWMRHALTLAKRARDEREVPVGAVLVLNNRVIGEGWNRAIGLHDPTAHAEIMALRQGGLVMQNYRLIDATLYVTFEPCVMCAGAMIHSRIGRVVFGVRNAKTGAAGSLMDVLHYPGMNHRVEITEGILADECAALLCYFFRMPRQVFNAQKKAQSSTDNIMNFFKTEITLANGEIRKRPLIETNGETGEIVWDKGRDFATVRKVLSMPQVNIVKKTEVQTGGFSKESILPKRNSDKLIARKKDWDPKKYGGFDSPTVAYSVLVVAKVEKGKSKKLKSVKELLGITIMERSSFEKNPIDFLEAKGYKEVKKDLIIKLPKYSLFELENGRKRMLASAGELQKGNELALPSKYVNFLYLASHYEKLKGSPEDNEQKQLFVEQHKHYLDEIIEQISEFSKRVILADANLDKVLSAYNKHRDKPIREQAENIIHLFTLTNLGAPAAFKYFDTTIDRKRYTSTKEVLDATLIHQSITGLYETRIDLSQLGGD

SEQ ID NO: 282 - protein, 1554 aa, Artificial Sequence
  Description of artificial sequence: 105 Cas9 TadAins 1068 polypeptide sequence
MDKKYSIGLAIGTNSVGWAVITDEYKVPSKKFKVLGNTDRHSIKKNLIGALLFDSGETAEATRLKRTARRRYTRRKNRICYLQEIFSNEMAKVDDSFFHRLEESFLVEEDKKHERHPIFGNIVDEVAYHEKYPTIYHLRKKLVDSTDKADLRLIYLALAHMIKFRGHFLIEGDLNPDNSDVDKLFIQLVQTYNQLFEENPINASGVDAKAILSARLSKSRRLENLIAQLPGEKKNGLFGNLIALSLGLTPNFKSNFDLAEDAKLQLSKDTYDDDLDNLLAQIGDQYADLFLAAKNLSDAILLSDILRVNTEITKAPLSASMIKRYDEHHQDLTLLKALVRQQLPEKYKEIFFDQSKNGYAGYIDGGASQEEFYKFIKPILEKMDGTEELLVKLNREDLLRKQRTFDNGSIPHQIHLGELHAILRRQEDFYPFLKDNREKIEKILTFRIPYYVGPLARGNSRFAWMTRKSEETITPWNFEEVVDKGASAQSFIERMTNFDKNLPNEKVLPKHSLLYEYFTVYNELTKVKYVTEGMRKPAFLSGEQKKAIVDLLFKTNRKVTVKQLKEDYFKKIECFDSVEISGVEDRFNASLGTYHDLLKIIKDKDFLDNEENEDILEDIVLTLTLFEDREMIEERLKTYAHLFDDKVMKQLKRRRYTGWGRLSRKLINGIRDKQSGKTILDFLKSDGFANRNFMQLIHDDSLTFKEDIQKAQVSGQGDSLHEHIANLAGSPAIKKGILQTVKVVDELVKVMGRHKPENIVIEMARENQTTQKGQKNSRERMKRIEEGIKELGSQILKEHPVENTQLQNEKLYLYYLQNGRDMYVDQELDINRLSDYDVDHIVPQSFLKDDSIDNKVLTRSDKNRGKSDNVPSEEVVKKMKNYWRQLLNAKLITQRKFDNLTKAERGGLSELDKAGFIKRQLVETRQITKHVAQILDSRMNTKYDENDKLIREVKVITLKSKLVSDFRKDFQFYKVREINNYHHAHDAYLNAVVGTALIKKYPKLESEFVYGDYKVYDVRKMIAKSEQEIGKATAKYFFYSNIMNFFKTEITLANGEIRKRPLIETNGEGSSGSETPGTSESATPESSGSEVEFSHEYWMRHALTLAKRARDEREVPVGAVLVLNNRVIGEGWNRAIGLHDPTAHAEIMALRQGGLVMQNYRLIDATLYVTFEPCVMCAGAMIHSRIGRVVFGVRNAKTGAAGSLMDVLHYPGMNHRVEITEGILADECAALLCYFFRMPRQVFNAQKKAQSSTDTGEIVWDKGRDFATVRKVLSMPQVNIVKKTEVQTGGFSKESILPKRNSDKLIARKKDWDPKKYGGFDSPTVAYSVLVVAKVEKGKSKKLKSVKELLGITIMERSSFEKNPIDFLEAKGYKEVKKDLIIKLPKYSLFELENGRKRMLASAGELQKGNELALPSKYVNFLYLASHYEKLKGSPEDNEQKQLFVEQHKHYLDEIIEQISEFSKRVILADANLDKVLSAYNKHRDKPIREQAENIIHLFTLTNLGAPAAFKYFDTTIDRKRYTSTKEVLDATLIHQSITGLYETRIDLSQLGGD

SEQ ID NO: 283 - protein, 1554 aa, Artificial Sequence
  Description of artificial sequence: 106 Cas9 TadAins 1247 polypeptide sequence
MDKKYSIGLAIGTNSVGWAVITDEYKVPSKKFKVLGNTDRHSIKKNLIGALLFDSGETAEATRLKRTARRRYTRRKNRICYLQEIFSNEMAKVDDSFFHRLEESFLVEEDKKHERHPIFGNIVDEVAYHEKYPTIYHLRKKLVDSTDKADLRLIYLALAHMIKFRGHFLIEGDLNPDNSDVDKLFIQLVQTYNQLFEENPINASGVDAKAILSARLSKSRRLENLIAQLPGEKKNGLFGNLIALSLGLTPNFKSNFDLAEDAKLQLSKDTYDDDLDNLLAQIGDQYADLFLAAKNLSDAILLSDILRVNTEITKAPLSASMIKRYDEHHQDLTLLKALVRQQLPEKYKEIFFDQSKNGYAGYIDGGASQEEFYKFIKPILEKMDGTEELLVKLNREDLLRKQRTFDNGSIPHQIHLGELHAILRRQEDFYPFLKDNREKIEKILTFRIPYYVGPLARGNSRFAWMTRKSEETITPWNFEEVVDKGASAQSFIERMTNFDKNLPNEKVLPKHSLLYEYFTVYNELTKVKYVTEGMRKPAFLSGEQKKAIVDLLFKTNRKVTVKQLKEDYFKKIECFDSVEISGVEDRFNASLGTYHDLLKIIKDKDFLDNEENEDILEDIVLTLTLFEDREMIEERLKTYAHLFDDKVMKQLKRRRYTGWGRLSRKLINGIRDKQSGKTILDFLKSDGFANRNFMQLIHDDSLTFKEDIQKAQVSGQGDSLHEHIANLAGSPAIKKGILQTVKVVDELVKVMGRHKPENIVIEMARENQTTQKGQKNSRERMKRIEEGIKELGSQILKEHPVENTQLQNEKLYLYYLQNGRDMYVDQELDINRLSDYDVDHIVPQSFLKDDSIDNKVLTRSDKNRGKSDNVPSEEVVKKMKNYWRQLLNAKLITQRKFDNLTKAERGGLSELDKAGFIKRQLVETRQITKHVAQILDSRMNTKYDENDKLIREVKVITLKSKLVSDFRKDFQFYKVREINNYHHAHDAYLNAVVGTALIKKYPKLESEFVYGDYKVYDVRKMIAKSEQEIGKATAKYFFYSNIMNFFKTEITLANGEIRKRPLIETNGETGEIVWDKGRDFATVRKVLSMPQVNIVKKTEVQTGGFSKESILPKRNSDKLIARKKDWDPKKYGGFDSPTVAYSVLVVAKVEKGKSKKLKSVKELLGITIMERSSFEKNPIDFLEAKGYKEVKKDLIIKLPKYSLFELENGRKRMLASAGELQKGNELALPSKYVNFLYLASHYEKLKGGSSGSETPGTSESATPESSGSEVEFSHEYWMRHALTLAKRARDEREVPVGAVLVLNNRVIGEGWNRAIGLHDPTAHAEIMALRQGGLVMQNYRLIDATLYVTFEPCVMCAGAMIHSRIGRVVFGVRNAKTGAAGSLMDVLHYPGMNHRVEITEGILADECAALLCYFFRMPRQVFNAQKKAQSSTDSPEDNEQKQLFVEQHKHYLDEIIEQISEFSKRVILADANLDKVLSAYNKHRDKPIREQAENIIHLFTLTNLGAPAAFKYFDTTIDRKRYTSTKEVLDATLIHQSITGLYETRIDLSQLGGD

SEQ ID NO: 284 - protein, 1554 aa, Artificial Sequence
  Description of artificial sequence: 107 Cas9 TadAins 1054 polypeptide sequence
MDKKYSIGLAIGTNSVGWAVITDEYKVPSKKFKVLGNTDRHSIKKNLIGALLFDSGETAEATRLKRTARRRYTRRKNRICYLQEIFSNEMAKVDDSFFHRLEESFLVEEDKKHERHPIFGNIVDEVAYHEKYPTIYHLRKKLVDSTDKADLRLIYLALAHMIKFRGHFLIEGDLNPDNSDVDKLFIQLVQTYNQLFEENPINASGVDAKAILSARLSKSRRLENLIAQLPGEKKNGLFGNLIALSLGLTPNFKSNFDLAEDAKLQLSKDTYDDDLDNLLAQIGDQYADLFLAAKNLSDAILLSDILRVNTEITKAPLSASMIKRYDEHHQDLTLLKALVRQQLPEKYKEIFFDQSKNGYAGYIDGGASQEEFYKFIKPILEKMDGTEELLVKLNREDLLRKQRTFDNGSIPHQIHLGELHAILRRQEDFYPFLKDNREKIEKILTFRIPYYVGPLARGNSRFAWMTRKSEETITPWNFEEVVDKGASAQSFIERMTNFDKNLPNEKVLPKHSLLYEYFTVYNELTKVKYVTEGMRKPAFLSGEQKKAIVDLLFKTNRKVTVKQLKEDYFKKIECFDSVEISGVEDRFNASLGTYHDLLKIIKDKDFLDNEENEDILEDIVLTLTLFEDREMIEERLKTYAHLFDDKVMKQLKRRRYTGWGRLSRKLINGIRDKQSGKTILDFLKSDGFANRNFMQLIHDDSLTFKEDIQKAQVSGQGDSLHEHIANLAGSPAIKKGILQTVKVVDELVKVMGRHKPENIVIEMARENQTTQKGQKNSRERMKRIEEGIKELGSQILKEHPVENTQLQNEKLYLYYLQNGRDMYVDQELDINRLSDYDVDHIVPQSFLKDDSIDNKVLTRSDKNRGKSDNVPSEEVVKKMKNYWRQLLNAKLITQRKFDNLTKAERGGLSELDKAGFIKRQLVETRQITKHVAQILDSRMNTKYDENDKLIREVKVITLKSKLVSDFRKDFQFYKVREINNYHHAHDAYLNAVVGTALIKKYPKLESEFVYGDYKVYDVRKMIAKSEQEIGKATAKYFFYSNIMNFFKTEITLANGSSGSETPGTSESATPESSGSEVEFSHEYWMRHALTLAKRARDEREVPVGAVLVLNNRVIGEGWNRAIGLHDPTAHAEIMALRQGGLVMQNYRLIDATLYVTFEPCVMCAGAMIHSRIGRVVFGVRNAKTGAAGSLMDVLHYPGMNHRVEITEGILADECAALLCYFFRMPRQVFNAQKKAQSSTDGEIRKRPLIETNGETGEIVWDKGRDFATVRKVLSMPQVNIVKKTEVQTGGFSKESILPKRNSDKLIARKKDWDPKKYGGFDSPTVAYSVLVVAKVEKGKSKKLKSVKELLGITIMERSSFEKNPIDFLEAKGYKEVKKDLIIKLPKYSLFELENGRKRMLASAGELQKGNELALPSKYVNFLYLASHYEKLKGSPEDNEQKQLFVEQHKHYLDEIIEQISEFSKRVILADANLDKVLSAYNKHRDKPIREQAENIIHLFTLTNLGAPAAFKYFDTTIDRKRYTSTKEVLDATLIHQSITGLYETRIDLSQLGGD

SEQ ID NO: 285 - protein, 1554 aa, Artificial Sequence
  Description of artificial sequence: 108 Cas9 TadAins 1026 polypeptide sequence
MDKKYSIGLAIGTNSVGWAVITDEYKVPSKKFKVLGNTDRHSIKKNLIGALLFDSGETAEATRLKRTARRRYTRRKNRICYLQEIFSNEMAKVDDSFFHRLEESFLVEEDKKHERHPIFGNIVDEVAYHEKYPTIYHLRKKLVDSTDKADLRLIYLALAHMIKFRGHFLIEGDLNPDNSDVDKLFIQLVQTYNQLFEENPINASGVDAKAILSARLSKSRRLENLIAQLPGEKKNGLFGNLIALSLGLTPNFKSNFDLAEDAKLQLSKDTYDDDLDNLLAQIGDQYADLFLAAKNLSDAILLSDILRVNTEITKAPLSASMIKRYDEHHQDLTLLKALVRQQLPEKYKEIFFDQSKNGYAGYIDGGASQEEFYKFIKPILEKMDGTEELLVKLNREDLLRKQRTFDNGSIPHQIHLGELHAILRRQEDFYPFLKDNREKIEKILTFRIPYYVGPLARGNSRFAWMTRKSEETITPWNFEEVVDKGASAQSFIERMTNFDKNLPNEKVLPKHSLLYEYFTVYNELTKVKYVTEGMRKPAFLSGEQKKAIVDLLFKTNRKVTVKQLKEDYFKKIECFDSVEISGVEDRFNASLGTYHDLLKIIKDKDFLDNEENEDILEDIVLTLTLFEDREMIEERLKTYAHLFDDKVMKQLKRRRYTGWGRLSRKLINGIRDKQSGKTILDFLKSDGFANRNFMQLIHDDSLTFKEDIQKAQVSGQGDSLHEHIANLAGSPAIKKGILQTVKVVDELVKVMGRHKPENIVIEMARENQTTQKGQKNSRERMKRIEEGIKELGSQILKEHPVENTQLQNEKLYLYYLQNGRDMYVDQELDINRLSDYDVDHIVPQSFLKDDSIDNKVLTRSDKNRGKSDNVPSEEVVKKMKNYWRQLLNAKLITQRKFDNLTKAERGGLSELDKAGFIKRQLVETRQITKHVAQILDSRMNTKYDENDKLIREVKVITLKSKLVSDFRKDFQFYKVREINNYHHAHDAYLNAVVGTALIKKYPKLESEFVYGDYKVYDVRKMIAKSEGSSGSETPGTSESATPESSGSEVEFSHEYWMRHALTLAKRARDEREVPVGAVLVLNNRVIGEGWNRAIGLHDPTAHAEIMALRQGGLVMQNYRLIDATLYVTFEPCVMCAGAMIHSRIGRVVFGVRNAKTGAAGSLMDVLHYPGMNHRVEITEGILADECAALLCYFFRMPRQVFNAQKKAQSSTDQEIGKATAKYFFYSNIMNFFKTEITLANGEIRKRPLIETNGETGEIVWDKGRDFATVRKVLSMPQVNIVKKTEVQTGGFSKESILPKRNSDKLIARKKDWDPKKYGGFDSPTVAYSVLVVAKVEKGKSKKLKSVKELLGITIMERSSFEKNPIDFLEAKGYKEVKKDLIIKLPKYSLFELENGRKRMLASAGELQKGNELALPSKYVNFLYLASHYEKLKGSPEDNEQKQLFVEQHKHYLDEIIEQISEFSKRVILADANLDKVLSAYNKHRDKPIREQAENIIHLFTLTNLGAPAAFKYFDTTIDRKRYTSTKEVLDATLIHQSITGLYETRIDLSQLGGD

SEQ ID NO: 286 - protein, 1540 aa, Artificial Sequence
  Description of artificial sequence: 109 Cas9 TadAins 768 polypeptide sequence
MDKKYSIGLAIGTNSVGWAVITDEYKVPSKKFKVLGNTDRHSIKKNLIGALLFDSGETAEATRLKRTARRRYTRRKNRICYLQEIFSNEMAKVDDSFFHRLEESFLVEEDKKHERHPIFGNIVDEVAYHEKYPTIYHLRKKLVDSTDKADLRLIYLALAHMIKFRGHFLIEGDLNPDNSDVDKLFIQLVQTYNQLFEENPINASGVDAKAILSARLSKSRRLENLIAQLPGEKKNGLFGNLIALSLGLTPNFKSNFDLAEDAKLQLSKDTYDDDLDNLLAQIGDQYADLFLAAKNLSDAILLSDILRVNTEITKAPLSASMIKRYDEHHQDLTLLKALVRQQLPEKYKEIFFDQSKNGYAGYIDGGASQEEFYKFIKPILEKMDGTEELLVKLNREDLLRKQRTFDNGSIPHQIHLGELHAILRRQEDFYPFLKDNREKIEKILTFRIPYYVGPLARGNSRFAWMTRKSEETITPWNFEEVVDKGASAQSFIERMTNFDKNLPNEKVLPKHSLLYEYFTVYNELTKVKYVTEGMRKPAFLSGEQKKAIVDLLFKTNRKVTVKQLKEDYFKKIECFDSVEISGVEDRFNASLGTYHDLLKIIKDKDFLDNEENEDILEDIVLTLTLFEDREMIEERLKTYAHLFDDKVMKQLKRRRYTGWGRLSRKLINGIRDKQSGKTILDFLKSDGFANRNFMQLIHDDSLTFKEDIQKAQVSGQGDSLHEHIANLAGSPAIKKGILQTVKVVDELVKVMGRHKPENIVIEMARENQGSSGSETPGTSESATPESSGSEVEFSHEYWMRHALTLAKRARDEREVPVGAVLVLNNRVIGEGWNRAIGLHDPTAHAEIMALRQGGLVMQNYRLIDATLYVTFEPCVMCAGAMIHSRIGRVVFGVRNAKTGAAGSLMDVLHYPGMNHRVEITEGILADECAALLCYFFRMPRTTQKGQKNSRERMKRIEEGIKELGSQILKEHPVENTQLQNEKLYLYYLQNGRDMYVDQELDINRLSDYDVDHIVPQSFLKDDSIDNKVLTRSDKNRGKSDNVPSEEVVKKMKNYWRQLLNAKLITQRKFDNLTKAERGGLSELDKAGFIKRQLVETRQITKHVAQILDSRMNTKYDENDKLIREVKVITLKSKLVSDFRKDFQFYKVREINNYHHAHDAYLNAVVGTALIKKYPKLESEFVYGDYKVYDVRKMIAKSEQEIGKATAKYFFYSNIMNFFKTEITLANGEIRKRPLIETNGETGEIVWDKGRDFATVRKVLSMPQVNIVKKTEVQTGGFSKESILPKRNSDKLIARKKDWDPKKYGGFDSPTVAYSVLVVAKVEKGKSKKLKSVKELLGITIMERSSFEKNPIDFLEAKGYKEVKKDLIIKLPKYSLFELENGRKRMLASAGELQKGNELALPSKYVNFLYLASHYEKLKGSPEDNEQKQLFVEQHKHYLDEIIEQISEFSKRVILADANLDKVLSAYNKHRDKPIREQAENIIHLFTLTNLGAPAAFKYFDTTIDRKRYTSTKEVLDATLIHQSITGLYETRIDLSQLGGD

SEQ ID NO: 287 - protein, 1540 aa, Artificial Sequence
  Description of artificial sequence: 110.1 Cas9 TadAins 1250 polypeptide sequence
MDKKYSIGLAIGTNSVGWAVITDEYKVPSKKFKVLGNTDRHSIKKNLIGALLFDSGETAEATRLKRTARRRYTRRKNRICYLQEIFSNEMAKVDDSFFHRLEESFLVEEDKKHERHPIFGNIVDEVAYHEKYPTIYHLRKKLVDSTDKADLRLIYLALAHMIKFRGHFLIEGDLNPDNSDVDKLFIQLVQTYNQLFEENPINASGVDAKAILSARLSKSRRLENLIAQLPGEKKNGLFGNLIALSLGLTPNFKSNFDLAEDAKLQLSKDTYDDDLDNLLAQIGDQYADLFLAAKNLSDAILLSDILRVNTEITKAPLSASMIKRYDEHHQDLTLLKALVRQQLPEKYKEIFFDQSKNGYAGYIDGGASQEEFYKFIKPILEKMDGTEELLVKLNREDLLRKQRTFDNGSIPHQIHLGELHAILRRQEDFYPFLKDNREKIEKILTFRIPYYVGPLARGNSRFAWMTRKSEETITPWNFEEVVDKGASAQSFIERMTNFDKNLPNEKVLPKHSLLYEYFTVYNELTKVKYVTEGMRKPAFLSGEQKKAIVDLLFKTNRKVTVKQLKEDYFKKIECFDSVEISGVEDRFNASLGTYHDLLKIIKDKDFLDNEENEDILEDIVLTLTLFEDREMIEERLKTYAHLFDDKVMKQLKRRRYTGWGRLSRKLINGIRDKQSGKTILDFLKSDGFANRNFMQLIHDDSLTFKEDIQKAQVSGQGDSLHEHIANLAGSPAIKKGILQTVKVVDELVKVMGRHKPENIVIEMARENQTTQKGQKNSRERMKRIEEGIKELGSQILKEHPVENTQLQNEKLYLYYLQNGRDMYVDQELDINRLSDYDVDHIVPQSFLKDDSIDNKVLTRSDKNRGKSDNVPSEEVVKKMKNYWRQLLNAKLITQRKFDNLTKAERGGLSELDKAGFIKRQLVETRQITKHVAQILDSRMNTKYDENDKLIREVKVITLKSKLVSDFRKDFQFYKVREINNYHHAHDAYLNAVVGTALIKKYPKLESEFVYGDYKVYDVRKMIAKSEQEIGKATAKYFFYSNIMNFFKTEITLANGEIRKRPLIETNGETGEIVWDKGRDFATVRKVLSMPQVNIVKKTEVQTGGFSKESILPKRNSDKLIARKKDWDPKKYGGFDSPTVAYSVLVVAKVEKGKSKKLKSVKELLGITIMERSSFEKNPIDFLEAKGYKEVKKDLIIKLPKYSLFELENGRKRMLASAGELQKGNELALPSKYVNFLYLASHYEKLKGSPGSSGSETPGTSESATPESSGSEVEFSHEYWMRHALTLAKRARDEREVPVGAVLVLNNRVIGEGWNRAIGLHDPTAHAEIMALRQGGLVMQNYRLIDATLYVTFEPCVMCAGAMIHSRIGRVVFGVRNAKTGAAGSLMDVLHYPGMNHRVEITEGILADECAALLCYFFRMPREDNEQKQLFVEQHKHYLDEIIEQISEFSKRVILADANLDKVLSAYNKHRDKPIREQAENIIHLFTLTNLGAPAAFKYFDTTIDRKRYTSTKEVLDATLIHQSITGLYETRIDLSQLGGD

SEQ ID NO: 288 - protein, 1543 aa, Artificial Sequence
  Description of artificial sequence: 110.2 Cas9 TadAins 1250 polypeptide sequence
MDKKYSIGLAIGTNSVGWAVITDEYKVPSKKFKVLGNTDRHSIKKNLIGALLFDSGETAEATRLKRTARRRYTRRKNRICYLQEIFSNEMAKVDDSFFHRLEESFLVEEDKKHERHPIFGNIVDEVAYHEKYPTIYHLRKKLVDSTDKADLRLIYLALAHMIKFRGHFLIEGDLNPDNSDVDKLFIQLVQTYNQLFEENPINASGVDAKAILSARLSKSRRLENLIAQLPGEKKNGLFGNLIALSLGLTPNFKSNFDLAEDAKLQLSKDTYDDDLDNLLAQIGDQYADLFLAAKNLSDAILLSDILRVNTEITKAPLSASMIKRYDEHHQDLTLLKALVRQQLPEKYKEIFFDQSKNGYAGYIDGGASQEEFYKFIKPILEKMDGTEELLVKLNREDLLRKQRTFDNGSIPHQIHLGELHAILRRQEDFYPFLKDNREKIEKILTFRIPYYVGPLARGNSRFAWMTRKSEETITPWNFEEVVDKGASAQSFIERMTNFDKNLPNEKVLPKHSLLYEYFTVYNELTKVKYVTEGMRKPAFLSGEQKKAIVDLLFKTNRKVTVKQLKEDYFKKIECFDSVEISGVEDRFNASLGTYHDLLKIIKDKDFLDNEENEDILEDIVLTLTLFEDREMIEERLKTYAHLFDDKVMKQLKRRRYTGWGRLSRKLINGIRDKQSGKTILDFLKSDGFANRNFMQLIHDDSLTFKEDIQKAQVSGQGDSLHEHIANLAGSPAIKKGILQTVKVVDELVKVMGRHKPENIVIEMARENQTTQKGQKNSRERMKRIEEGIKELGSQILKEHPVENTQLQNEKLYLYYLQNGRDMYVDQELDINRLSDYDVDHIVPQSFLKDDSIDNKVLTRSDKNRGKSDNVPSEEVVKKMKNYWRQLLNAKLITQRKFDNLTKAERGGLSELDKAGFIKRQLVETRQITKHVAQILDSRMNTKYDENDKLIREVKVITLKSKLVSDFRKDFQFYKVREINNYHHAHDAYLNAVVGTALIKKYPKLESEFVYGDYKVYDVRKMIAKSEQEIGKATAKYFFYSNIMNFFKTEITLANGEIRKRPLIETNGETGEIVWDKGRDFATVRKVLSMPQVNIVKKTEVQTGGFSKESILPKRNSDKLIARKKDWDPKKYGGFDSPTVAYSVLVVAKVEKGKSKKLKSVKELLGITIMERSSFEKNPIDFLEAKGYKEVKKDLIIKLPKYSLFELENGRKRMLASAGELQKGNELALPSKYVNFLYLASHYEKLKGSPGSSGSSGSETPGTSESATPESSGSEVEFSHEYWMRHALTLAKRARDEREVPVGAVLVLNNRVIGEGWNRAIGLHDPTAHAEIMALRQGGLVMQNYRLIDATLYVTFEPCVMCAGAMIHSRIGRVVFGVRNAKTGAAGSLMDVLHYPGMNHRVEITEGILADECAALLCYFFRMPREDNEQKQLFVEQHKHYLDEIIEQISEFSKRVILADANLDKVLSAYNKHRDKPIREQAENIIHLFTLTNLGAPAAFKYFDTTIDRKRYTSTKEVLDATLIHQSITGLYETRIDLSQLGGD

SEQ ID NO: 289 - protein, 1546 aa, Artificial Sequence
  Description of artificial sequence: 110.3 Cas9 TadAins 1250 polypeptide sequence
MDKKYSIGLAIGTNSVGWAVITDEYKVPSKKFKVLGNTDRHSIKKNLIGALLFDSGETAEATRLKRTARRRYTRRKNRICYLQEIFSNEMAKVDDSFFHRLEESFLVEEDKKHERHPIFGNIVDEVAYHEKYPTIYHLRKKLVDSTDKADLRLIYLALAHMIKFRGHFLIEGDLNPDNSDVDKLFIQLVQTYNQLFEENPINASGVDAKAILSARLSKSRRLENLIAQLPGEKKNGLFGNLIALSLGLTPNFKSNFDLAEDAKLQLSKDTYDDDLDNLLAQIGDQYADLFLAAKNLSDAILLSDILRVNTEITKAPLSASMIKRYDEHHQDLTLLKALVRQQLPEKYKEIFFDQSKNGYAGYIDGGASQEEFYKFIKPILEKMDGTEELLVKLNREDLLRKQRTFDNGSIPHQIHLGELHAILRRQEDFYPFLKDNREKIEKILTFRIPYYVGPLARGNSRFAWMTRKSEETITPWNFEEVVDKGASAQSFIERMTNFDKNLPNEKVLPKHSLLYEYFTVYNELTKVKYVTEGMRKPAFLSGEQKKAIVDLLFKTNRKVTVKQLKEDYFKKIECFDSVEISGVEDRFNASLGTYHDLLKIIKDKDFLDNEENEDILEDIVLTLTLFEDREMIEERLKTYAHLFDDKVMKQLKRRRYTGWGRLSRKLINGIRDKQSGKTILDFLKSDGFANRNFMQLIHDDSLTFKEDIQKAQVSGQGDSLHEHIANLAGSPAIKKGILQTVKVVDELVKVMGRHKPENIVIEMARENQTTQKGQKNSRERMKRIEEGIKELGSQILKEHPVENTQLQNEKLYLYYLQNGRDMYVDQELDINRLSDYDVDHIVPQSFLKDDSIDNKVLTRSDKNRGKSDNVPSEEVVKKMKNYWRQLLNAKLITQRKFDNLTKAERGGLSELDKAGFIKRQLVETRQITKHVAQILDSRMNTKYDENDKLIREVKVITLKSKLVSDFRKDFQFYKVREINNYHHAHDAYLNAVVGTALIKKYPKLESEFVYGDYKVYDVRKMIAKSEQEIGKATAKYFFYSNIMNFFKTEITLANGEIRKRPLIETNGETGEIVWDKGRDFATVRKVLSMPQVNIVKKTEVQTGGFSKESILPKRNSDKLIARKKDWDPKKYGGFDSPTVAYSVLVVAKVEKGKSKKLKSVKELLGITIMERSSFEKNPIDFLEAKGYKEVKKDLIIKLPKYSLFELENGRKRMLASAGELQKGNELALPSKYVNFLYLASHYEKLKGSPGSSGSSGSETPGTSESATPESGSSSGSEVEFSHEYWMRHALTLAKRARDEREVPVGAVLVLNNRVIGEGWNRAIGLHDPTAHAEIMALRQGGLVMQNYRLIDATLYVTFEPCVMCAGAMIHSRIGRVVFGVRNAKTGAAGSLMDVLHYPGMNHRVEITEGILADECAALLCYFFRMPREDNEQKQLFVEQHKHYLDEIIEQISEFSKRVILADANLDKVLSAYNKHRDKPIREQAENIIHLFTLTNLGAPAAFKYFDTTIDRKRYTSTKEVLDATLIHQSITGLYETRIDLSQLGGD

SEQ ID NO: 290 - protein, 1546 aa, Artificial Sequence
  Description of artificial sequence: 110.4 Cas9 TadAins 1250 polypeptide sequence
MDKKYSIGLAIGTNSVGWAVITDEYKVPSKKFKVLGNTDRHSIKKNLIGALLFDSGETAEATRLKRTARRRYTRRKNRICYLQEIFSNEMAKVDDSFFHRLEESFLVEEDKKHERHPIFGNIVDEVAYHEKYPTIYHLRKKLVDSTDKADLRLIYLALAHMIKFRGHFLIEGDLNPDNSDVDKLFIQLVQTYNQLFEENPINASGVDAKAILSARLSKSRRLENLIAQLPGEKKNGLFGNLIALSLGLTPNFKSNFDLAEDAKLQLSKDTYDDDLDNLLAQIGDQYADLFLAAKNLSDAILLSDILRVNTEITKAPLSASMIKRYDEHHQDLTLLKALVRQQLPEKYKEIFFDQSKNGYAGYIDGGASQEEFYKFIKPILEKMDGTEELLVKLNREDLLRKQRTFDNGSIPHQIHLGELHAILRRQEDFYPFLKDNREKIEKILTFRIPYYVGPLARGNSRFAWMTRKSEETITPWNFEEVVDKGASAQSFIERMTNFDKNLPNEKVLPKHSLLYEYFTVYNELTKVKYVTEGMRKPAFLSGEQKKAIVDLLFKTNRKVTVKQLKEDYFKKIECFDSVEISGVEDRFNASLGTYHDLLKIIKDKDFLDNEENEDILEDIVLTLTLFEDREMIEERLKTYAHLFDDKVMKQLKRRRYTGWGRLSRKLINGIRDKQSGKTILDFLKSDGFANRNFMQLIHDDSLTFKEDIQKAQVSGQGDSLHEHIANLAGSPAIKKGILQTVKVVDELVKVMGRHKPENIVIEMARENQTTQKGQKNSRERMKRIEEGIKELGSQILKEHPVENTQLQNEKLYLYYLQNGRDMYVDQELDINRLSDYDVDHIVPQSFLKDDSIDNKVLTRSDKNRGKSDNVPSEEVVKKMKNYWRQLLNAKLITQRKFDNLTKAERGGLSELDKAGFIKRQLVETRQITKHVAQILDSRMNTKYDENDKLIREVKVITLKSKLVSDFRKDFQFYKVREINNYHHAHDAYLNAVVGTALIKKYPKLESEFVYGDYKVYDVRKMIAKSEQEIGKATAKYFFYSNIMNFFKTEITLANGEIRKRPLIETNGETGEIVWDKGRDFATVRKVLSMPQVNIVKKTEVQTGGFSKESILPKRNSDKLIARKKDWDPKKYGGFDSPTVAYSVLVVAKVEKGKSKKLKSVKELLGITIMERSSFEKNPIDFLEAKGYKEVKKDLIIKLPKYSLFELENGRKRMLASAGELQKGNELALPSKYVNFLYLASHYEKLKGSPGSSGSSGSETPGTSESATPESGSSSGSEVEFSHEYWMRHALTLAKRARDEREVPVGAVLVLNNRVIGEGWNRAIGLHDPTAHAEIMALRQGGLVMQNYRLIDATLYVTFEPCVMCAGAMIHSRIGRVVFGVRNAKTGAAGSLMDVLHYPGMNHRVEITEGILADECAALLCYFFRMRREDNEQKQLFVEQHKHYLDEIIEQISEFSKRVILADANLDKVLSAYNKHRDKPIREQAENIIHLFTLTNLGAPAAFKYFDTTIDRKRYTSTKEVLDATLIHQSITGLYETRIDLSQLGGD

SEQ ID NO: 291 - protein, 1546 aa, Artificial Sequence
  Description of artificial sequence: 110.5 Cas9 TadAins 1249 polypeptide sequence
MDKKYSIGLAIGTNSVGWAVITDEYKVPSKKFKVLGNTDRHSIKKNLIGALLFDSGETAEATRLKRTARRRYTRRKNRICYLQEIFSNEMAKVDDSFFHRLEESFLVEEDKKHERHPIFGNIVDEVAYHEKYPTIYHLRKKLVDSTDKADLRLIYLALAHMIKFRGHFLIEGDLNPDNSDVDKLFIQLVQTYNQLFEENPINASGVDAKAILSARLSKSRRLENLIAQLPGEKKNGLFGNLIALSLGLTPNFKSNFDLAEDAKLQLSKDTYDDDLDNLLAQIGDQYADLFLAAKNLSDAILLSDILRVNTEITKAPLSASMIKRYDEHHQDLTLLKALVRQQLPEKYKEIFFDQSKNGYAGYIDGGASQEEFYKFIKPILEKMDGTEELLVKLNREDLLRKQRTFDNGSIPHQIHLGELHAILRRQEDFYPFLKDNREKIEKILTFRIPYYVGPLARGNSRFAWMTRKSEETITPWNFEEVVDKGASAQSFIERMTNFDKNLPNEKVLPKHSLLYEYFTVYNELTKVKYVTEGMRKPAFLSGEQKKAIVDLLFKTNRKVTVKQLKEDYFKKIECFDSVEISGVEDRFNASLGTYHDLLKIIKDKDFLDNEENEDILEDIVLTLTLFEDREMIEERLKTYAHLFDDKVMKQLKRRRYTGWGRLSRKLINGIRDKQSGKTILDFLKSDGFANRNFMQLIHDDSLTFKEDIQKAQVSGQGDSLHEHIANLAGSPAIKKGILQTVKVVDELVKVMGRHKPENIVIEMARENQTTQKGQKNSRERMKRIEEGIKELGSQILKEHPVENTQLQNEKLYLYYLQNGRDMYVDQELDINRLSDYDVDHIVPQSFLKDDSIDNKVLTRSDKNRGKSDNVPSEEVVKKMKNYWRQLLNAKLITQRKFDNLTKAERGGLSELDKAGFIKRQLVETRQITKHVAQILDSRMNTKYDENDKLIREVKVITLKSKLVSDFRKDFQFYKVREINNYHHAHDAYLNAVVGTALIKKYPKLESEFVYGDYKVYDVRKMIAKSEQEIGKATAKYFFYSNIMNFFKTEITLANGEIRKRPLIETNGETGEIVWDKGRDFATVRKVLSMPQVNIVKKTEVQTGGFSKESILPKRNSDKLIARKKDWDPKKYGGFDSPTVAYSVLVVAKVEKGKSKKLKSVKELLGITIMERSSFEKNPIDFLEAKGYKEVKKDLIIKLPKYSLFELENGRKRMLASAGELQKGNELALPSKYVNFLYLASHYEKLKGSGSSGSSGSETPGTSESATPESGSSSGSEVEFSHEYWMRHALTLAKRARDEREVPVGAVLVLNNRVIGEGWNRAIGLHDPTAHAEIMALRQGGLVMQNYRLIDATLYVTFEPCVMCAGAMIHSRIGRVVFGVRNAKTGAAGSLMDVLHYPGMNHRVEITEGILADECAALLCYFFRMRRPEDNEQKQLFVEQHKHYLDEIIEQISEFSKRVILADANLDKVLSAYNKHRDKPIREQAENIIHLFTLTNLGAPAAFKYFDTTIDRKRYTSTKEVLDATLIHQSITGLYETRIDLSQLGGD

SEQ ID NO: 292 - protein, 1551 aa, Artificial Sequence
  Description of artificial sequence: 110.5 Cas9 TadAins delta 59-66 1250 polypeptide sequence
MDKKYSIGLAIGTNSVGWAVITDEYKVPSKKFKVLGNTDRHSIKKNLIGALLFDSGETAEATRLKRTARRRYTRRKNRICYLQEIFSNEMAKVDDSFFHRLEESFLVEEDKKHERHPIFGNIVDEVAYHEKYPTIYHLRKKLVDSTDKADLRLIYLALAHMIKFRGHFLIEGDLNPDNSDVDKLFIQLVQTYNQLFEENPINASGVDAKAILSARLSKSRRLENLIAQLPGEKKNGLFGNLIALSLGLTPNFKSNFDLAEDAKLQLSKDTYDDDLDNLLAQIGDQYADLFLAAKNLSDAILLSDILRVNTEITKAPLSASMIKRYDEHHQDLTLLKALVRQQLPEKYKEIFFDQSKNGYAGYIDGGASQEEFYKFIKPILEKMDGTEELLVKLNREDLLRKQRTFDNGSIPHQIHLGELHAILRRQEDFYPFLKDNREKIEKILTFRIPYYVGPLARGNSRFAWMTRKSEETITPWNFEEVVDKGASAQSFIERMTNFDKNLPNEKVLPKHSLLYEYFTVYNELTKVKYVTEGMRKPAFLSGEQKKAIVDLLFKTNRKVTVKQLKEDYFKKIECFDSVEISGVEDRFNASLGTYHDLLKIIKDKDFLDNEENEDILEDIVLTLTLFEDREMIEERLKTYAHLFDDKVMKQLKRRRYTGWGRLSRKLINGIRDKQSGKTILDFLKSDGFANRNFMQLIHDDSLTFKEDIQKAQVSGQGDSLHEHIANLAGSPAIKKGILQTVKVVDELVKVMGRHKPENIVIEMARENQTTQKGQKNSRERMKRIEEGIKELGSQILKEHPVENTQLQNEKLYLYYLQNGRDMYVDQELDINRLSDYDVDHIVPQSFLKDDSIDNKVLTRSDKNRGKSDNVPSEEVVKKMKNYWRQLLNAKLITQRKFDNLTKAERGGLSELDKAGFIKRQLVETRQITKHVAQILDSRMNTKYDENDKLIREVKVITLKSKLVSDFRKDFQFYKVREINNYHHAHDAYLNAVVGTALIKKYPKLESEFVYGDYKVYDVRKMIAKSEQEIGKATAKYFFYSNIMNFFKTEITLANGEIRKRPLIETNGETGEIVWDKGRDFATVRKVLSMPQVNIVKKTEVQTGGFSKESILPKRNSDKLIARKKDWDPKKYGGFDSPTVAYSVLVVAKVEKGKSKKLKSVKELLGITIMERSSFEKNPIDFLEAKGYKEVKKDLIIKLPKYSLFELENGRKRMLASAGELQKGNELALPSKYVNFLYLASHYEKLKGSPGSSGSSGSETPGTSESATPESGSSGSEVEFSHEYWMRHALTLAKRARDEREVPVGAVLVLNNRVIGEGWNRAHAEIMALRQGGLVMQNYRLIDATLYVTFEPCVMCAGAMIHSRIGRVVFGVRNAKTGAAGSLMDVLHYPGMNHRVEITEGILADECAALLCYFFRMPRQVFNAQKKAQSSTDEDNEQKQLFVEQHKHYLDEIIEQISEFSKRVILADANLDKVLSAYNKHRDKPIREQAENIIHLFTLTNLGAPAAFKYFDTTIDRKRYTSTKEVLDATLIHQSITGLYETRIDLSQLGGD

SEQ ID NO: 293 - protein, 1546 aa, Artificial Sequence
  Description of artificial sequence: 110.6 Cas9 TadAins 1251 polypeptide sequence
MDKKYSIGLAIGTNSVGWAVITDEYKVPSKKFKVLGNTDRHSIKKNLIGALLFDSGETAEATRLKRTARRRYTRRKNRICYLQEIFSNEMAKVDDSFFHRLEESFLVEEDKKHERHPIFGNIVDEVAYHEKYPTIYHLRKKLVDSTDKADLRLIYLALAHMIKFRGHFLIEGDLNPDNSDVDKLFIQLVQTYNQLFEENPINASGVDAKAILSARLSKSRRLENLIAQLPGEKKNGLFGNLIALSLGLTPNFKSNFDLAEDAKLQLSKDTYDDDLDNLLAQIGDQYADLFLAAKNLSDAILLSDILRVNTEITKAPLSASMIKRYDEHHQDLTLLKALVRQQLPEKYKEIFFDQSKNGYAGYIDGGASQEEFYKFIKPILEKMDGTEELLVKLNREDLLRKQRTFDNGSIPHQIHLGELHAILRRQEDFYPFLKDNREKIEKILTFRIPYYVGPLARGNSRFAWMTRKSEETITPWNFEEVVDKGASAQSFIERMTNFDKNLPNEKVLPKHSLLYEYFTVYNELTKVKYVTEGMRKPAFLSGEQKKAIVDLLFKTNRKVTVKQLKEDYFKKIECFDSVEISGVEDRFNASLGTYHDLLKIIKDKDFLDNEENEDILEDIVLTLTLFEDREMIEERLKTYAHLFDDKVMKQLKRRRYTGWGRLSRKLINGIRDKQSGKTILDFLKSDGFANRNFMQLIHDDSLTFKEDIQKAQVSGQGDSLHEHIANLAGSPAIKKGILQTVKVVDELVKVMGRHKPENIVIEMARENQTTQKGQKNSRERMKRIEEGIKELGSQILKEHPVENTQLQNEKLYLYYLQNGRDMYVDQELDINRLSDYDVDHIVPQSFLKDDSIDNKVLTRSDKNRGKSDNVPSEEVVKKMKNYWRQLLNAKLITQRKFDNLTKAERGGLSELDKAGFIKRQLVETRQITKHVAQILDSRMNTKYDENDKLIREVKVITLKSKLVSDFRKDFQFYKVREINNYHHAHDAYLNAVVGTALIKKYPKLESEFVYGDYKVYDVRKMIAKSEQEIGKATAKYFFYSNIMNFFKTEITLANGEIRKRPLIETNGETGEIVWDKGRDFATVRKVLSMPQVNIVKKTEVQTGGFSKESILPKRNSDKLIARKKDWDPKKYGGFDSPTVAYSVLVVAKVEKGKSKKLKSVKELLGITIMERSSFEKNPIDFLEAKGYKEVKKDLIIKLPKYSLFELENGRKRMLASAGELQKGNELALPSKYVNFLYLASHYEKLKGSPEGSSGSSGSETPGTSESATPESGSSSGSEVEFSHEYWMRHALTLAKRARDEREVPVGAVLVLNNRVIGEGWNRAIGLHDPTAHAEIMALRQGGLVMQNYRLIDATLYVTFEPCVMCAGAMIHSRIGRVVFGVRNAKTGAAGSLMDVLHYPGMNHRVEITEGILADECAALLCYFFRMRRDNEQKQLFVEQHKHYLDEIIEQISEFSKRVILADANLDKVLSAYNKHRDKPIREQAENIIHLFTLTNLGAPAAFKYFDTTIDRKRYTSTKEVLDATLIHQSITGLYETRIDLSQLGGD

SEQ ID NO: 294 - protein, 1546 aa, Artificial Sequence
  Description of artificial sequence: 110.7 Cas9 TadAins 1252 polypeptide sequence
MDKKYSIGLAIGTNSVGWAVITDEYKVPSKKFKVLGNTDRHSIKKNLIGALLFDSGETAEATRLKRTARRRYTRRKNRICYLQEIFSNEMAKVDDSFFHRLEESFLVEEDKKHERHPIFGNIVDEVAYHEKYPTIYHLRKKLVDSTDKADLRLIYLALAHMIKFRGHFLIEGDLNPDNSDVDKLFIQLVQTYNQLFEENPINASGVDAKAILSARLSKSRRLENLIAQLPGEKKNGLFGNLIALSLGLTPNFKSNFDLAEDAKLQLSKDTYDDDLDNLLAQIGDQYADLFLAAKNLSDAILLSDILRVNTEITKAPLSASMIKRYDEHHQDLTLLKALVRQQLPEKYKEIFFDQSKNGYAGYIDGGASQEEFYKFIKPILEKMDGTEELLVKLNREDLLRKQRTFDNGSIPHQIHLGELHAILRRQEDFYPFLKDNREKIEKILTFRIPYYVGPLARGNSRFAWMTRKSEETITPWNFEEVVDKGASAQSFIERMTNFDKNLPNEKVLPKHSLLYEYFTVYNELTKVKYVTEGMRKPAFLSGEQKKAIVDLLFKTNRKVTVKQLKEDYFKKIECFDSVEISGVEDRFNASLGTYHDLLKIIKDKDFLDNEENEDILEDIVLTLTLFEDREMIEERLKTYAHLFDDKVMKQLKRRRYTGWGRLSRKLINGIRDKQSGKTILDFLKSDGFANRNFMQLIHDDSLTFKEDIQKAQVSGQGDSLHEHIANLAGSPAIKKGILQTVKVVDELVKVMGRHKPENIVIEMARENQTTQKGQKNSRERMKRIEEGIKELGSQILKEHPVENTQLQNEKLYLYYLQNGRDMYVDQELDINRLSDYDVDHIVPQSFLKDDSIDNKVLTRSDKNRGKSDNVPSEEVVKKMKNYWRQLLNAKLITQRKFDNLTKAERGGLSELDKAGFIKRQLVETRQITKHVAQILDSRMNTKYDENDKLIREVKVITLKSKLVSDFRKDFQFYKVREINNYHHAHDAYLNAVVGTALIKKYPKLESEFVYGDYKVYDVRKMIAKSEQEIGKATAKYFFYSNIMNFFKTEITLANGEIRKRPLIETNGETGEIVWDKGRDFATVRKVLSMPQVNIVKKTEVQTGGFSKESILPKRNSDKLIARKKDWDPKKYGGFDSPTVAYSVLVVAKVEKGKSKKLKSVKELLGITIMERSSFEKNPIDFLEAKGYKEVKKDLIIKLPKYSLFELENGRKRMLASAGELQKGNELALPSKYVNFLYLASHYEKLKGSPEDGSSGSSGSETPGTSESATPESGSSSGSEVEFSHEYWMRHALTLAKRARDEREVPVGAVLVLNNRVIGEGWNRAIGLHDPTAHAEIMALRQGGLVMQNYRLIDATLYVTFEPCVMCAGAMIHSRIGRVVFGVRNAKTGAAGSLMDVLHYPGMNHRVEITEGILADECAALLCYFFRMRRNEQKQLFVEQHKHYLDEIIEQISEFSKRVILADANLDKVLSAYNKHRDKPIREQAENIIHLFTLTNLGAPAAFKYFDTTIDRKRYTSTKEVLDATLIHQSITGLYETRIDLSQLGGD

SEQ ID NO: 295 - protein, 1533 aa, Artificial Sequence
  Description of artificial sequence: 110.8 Cas9 TadAins delta 59-66 C-truncate 1250 polypeptide sequence
MDKKYSIGLAIGTNSVGWAVITDEYKVPSKKFKVLGNTDRHSIKKNLIGALLFDSGETAEATRLKRTARRRYTRRKNRICYLQEIFSNEMAKVDDSFFHRLEESFLVEEDKKHERHPIFGNIVDEVAYHEKYPTIYHLRKKLVDSTDKADLRLIYLALAHMIKFRGHFLIEGDLNPDNSDVDKLFIQLVQTYNQLFEENPINASGVDAKAILSARLSKSRRLENLIAQLPGEKKNGLFGNLIALSLGLTPNFKSNFDLAEDAKLQLSKDTYDDDLDNLLAQIGDQYADLFLAAKNLSDAILLSDILRVNTEITKAPLSASMIKRYDEHHQDLTLLKALVRQQLPEKYKEIFFDQSKNGYAGYIDGGASQEEFYKFIKPILEKMDGTEELLVKLNREDLLRKQRTFDNGSIPHQIHLGELHAILRRQEDFYPFLKDNREKIEKILTFRIPYYVGPLARGNSRFAWMTRKSEETITPWNFEEVVDKGASAQSFIERMTNFDKNLPNEKVLPKHSLLYEYFTVYNELTKVKYVTEGMRKPAFLSGEQKKAIVDLLFKTNRKVTVKQLKEDYFKKIECFDSVEISGVEDRFNASLGTYHDLLKIIKDKDFLDNEENEDILEDIVLTLTLFEDREMIEERLKTYAHLFDDKVMKQLKRRRYTGWGRLSRKLINGIRDKQSGKTILDFLKSDGFANRNFMQLIHDDSLTFKEDIQKAQVSGQGDSLHEHIANLAGSPAIKKGILQTVKVVDELVKVMGRHKPENIVIEMARENQTTQKGQKNSRERMKRIEEGIKELGSQILKEHPVENTQLQNEKLYLYYLQNGRDMYVDQELDINRLSDYDVDHIVPQSFLKDDSIDNKVLTRSDKNRGKSDNVPSEEVVKKMKNYWRQLLNAKLITQRKFDNLTKAERGGLSELDKAGFIKRQLVETRQITKHVAQILDSRMNTKYDENDKLIREVKVITLKSKLVSDFRKDFQFYKVREINNYHHAHDAYLNAVVGTALIKKYPKLESEFVYGDYKVYDVRKMIAKSEQEIGKATAKYFFYSNIMNFFKTEITLANGEIRKRPLIETNGETGEIVWDKGRDFATVRKVLSMPQVNIVKKTEVQTGGFSKESILPKRNSDKLIARKKDWDPKKYGGFDSPTVAYSVLVVAKVEKGKSKKLKSVKELLGITIMERSSFEKNPIDFLEAKGYKEVKKDLIIKLPKYSLFELENGRKRMLASAGELQKGNELALPSKYVNFLYLASHYEKLKGSPGSSGSETPGTSESATPESSGSEVEFSHEYWMRHALTLAKRARDEREVPVGAVLVLNNRVIGEGWNRAHAEIMALRQGGLVMQNYRLIDATLYVTFEPCVMCAGAMIHSRIGRVVFGVRNAKTGAAGSLMDVLHYPGMNHRVEITEGILADECAALLCYFFRMPRQEDNEQKQLFVEQHKHYLDEIIEQISEFSKRVILADANLDKVLSAYNKHRDKPIREQAENIIHLFTLTNLGAPAAFKYFDTTIDRKRYTSTKEVLDATLIHQSITGLYETRIDLSQLGGD

SEQ ID NO: 296 - protein, 1549 aa, Artificial Sequence
  Description of artificial sequence: 111.1 Cas9 TadAins 997 polypeptide sequence
MDKKYSIGLAIGTNSVGWAVITDEYKVPSKKFKVLGNTDRHSIKKNLIGALLFDSGETAEATRLKRTARRRYTRRKNRICYLQEIFSNEMAKVDDSFFHRLEESFLVEEDKKHERHPIFGNIVDEVAYHEKYPTIYHLRKKLVDSTDKADLRLIYLALAHMIKFRGHFLIEGDLNPDNSDVDKLFIQLVQTYNQLFEENPINASGVDAKAILSARLSKSRRLENLIAQLPGEKKNGLFGNLIALSLGLTPNFKSNFDLAEDAKLQLSKDTYDDDLDNLLAQIGDQYADLFLAAKNLSDAILLSDILRVNTEITKAPLSASMIKRYDEHHQDLTLLKALVRQQLPEKYKEIFFDQSKNGYAGYIDGGASQEEFYKFIKPILEKMDGTEELLVKLNREDLLRKQRTFDNGSIPHQIHLGELHAILRRQEDFYPFLKDNREKIEKILTFRIPYYVGPLARGNSRFAWMTRKSEETITPWNFEEVVDKGASAQSFIERMTNFDKNLPNEKVLPKHSLLYEYFTVYNELTKVKYVTEGMRKPAFLSGEQKKAIVDLLFKTNRKVTVKQLKEDYFKKIECFDSVEISGVEDRFNASLGTYHDLLKIIKDKDFLDNEENEDILEDIVLTLTLFEDREMIEERLKTYAHLFDDKVMKQLKRRRYTGWGRLSRKLINGIRDKQSGKTILDFLKSDGFANRNFMQLIHDDSLTFKEDIQKAQVSGQGDSLHEHIANLAGSPAIKKGILQTVKVVDELVKVMGRHKPENIVIEMARENQTTQKGQKNSRERMKRIEEGIKELGSQILKEHPVENTQLQNEKLYLYYLQNGRDMYVDQELDINRLSDYDVDHIVPQSFLKDDSIDNKVLTRSDKNRGKSDNVPSEEVVKKMKNYWRQLLNAKLITQRKFDNLTKAERGGLSELDKAGFIKRQLVETRQITKHVAQILDSRMNTKYDENDKLIREVKVITLKSKLVSDFRKDFQFYKVREINNYHHAHDAYLNAVVGTALSHEYWMRHALTLAKRARDEREVPVGAVLVLNNRVIGEGWNRAIGLHDPTAHAEIMALRQGGLVMQNYRLIDATLYVTFEPCVMCAGAMIHSRIGRVVFGVRNAKTGAAGSLMDVLHYPGMNHRVEITEGILADECAALLCYFFRMPRQVFNAQKKAQSSTDGSSGSETPGTSESATPESSGIKKYPKLESEFVYGDYKVYDVRKMIAKSEQEIGKATAKYFFYSNIMNFFKTEITLANGEIRKRPLIETNGETGEIVWDKGRDFATVRKVLSMPQVNIVKKTEVQTGGFSKESILPKRNSDKLIARKKDWDPKKYGGFDSPTVAYSVLVVAKVEKGKSKKLKSVKELLGITIMERSSFEKNPIDFLEAKGYKEVKKDLIIKLPKYSLFELENGRKRMLASAGELQKGNELALPSKYVNFLYLASHYEKLKGSPEDNEQKQLFVEQHKHYLDEIIEQISEFSKRVILADANLDKVLSAYNKHRDKPIREQAENIIHLFTLTNLGAPAAFKYFDTTIDRKRYTSTKEVLDATLIHQSITGLYETRIDLSQLGGD

SEQ ID NO: 297 - protein, 1555 aa, Artificial Sequence
  Description of artificial sequence: 111.2 Cas9 TadAins 997 polypeptide sequence
MDKKYSIGLAIGTNSVGWAVITDEYKVPSKKFKVLGNTDRHSIKKNLIGALLFDSGETAEATRLKRTARRRYTRRKNRICYLQEIFSNEMAKVDDSFFHRLEESFLVEEDKKHERHPIFGNIVDEVAYHEKYPTIYHLRKKLVDSTDKADLRLIYLALAHMIKFRGHFLIEGDLNPDNSDVDKLFIQLVQTYNQLFEENPINASGVDAKAILSARLSKSRRLENLIAQLPGEKKNGLFGNLIALSLGLTPNFKSNFDLAEDAKLQLSKDTYDDDLDNLLAQIGDQYADLFLAAKNLSDAILLSDILRVNTEITKAPLSASMIKRYDEHHQDLTLLKALVRQQLPEKYKEIFFDQSKNGYAGYIDGGASQEEFYKFIKPILEKMDGTEELLVKLNREDLLRKQRTFDNGSIPHQIHLGELHAILRRQEDFYPFLKDNREKIEKILTFRIPYYVGPLARGNSRFAWMTRKSEETITPWNFEEVVDKGASAQSFIERMTNFDKNLPNEKVLPKHSLLYEYFTVYNELTKVKYVTEGMRKPAFLSGEQKKAIVDLLFKTNRKVTVKQLKEDYFKKIECFDSVEISGVEDRFNASLGTYHDLLKIIKDKDFLDNEENEDILEDIVLTLTLFEDREMIEERLKTYAHLFDDKVMKQLKRRRYTGWGRLSRKLINGIRDKQSGKTILDFLKSDGFANRNFMQLIHDDSLTFKEDIQKAQVSGQGDSLHEHIANLAGSPAIKKGILQTVKVVDELVKVMGRHKPENIVIEMARENQTTQKGQKNSRERMKRIEEGIKELGSQILKEHPVENTQLQNEKLYLYYLQNGRDMYVDQELDINRLSDYDVDHIVPQSFLKDDSIDNKVLTRSDKNRGKSDNVPSEEVVKKMKNYWRQLLNAKLITQRKFDNLTKAERGGLSELDKAGFIKRQLVETRQITKHVAQILDSRMNTKYDENDKLIREVKVITLKSKLVSDFRKDFQFYKVREINNYHHAHDAYLNAVVGTALSHEYWMRHALTLAKRARDEREVPVGAVLVLNNRVIGEGWNRAIGLHDPTAHAEIMALRQGGLVMQNYRLIDATLYVTFEPCVMCAGAMIHSRIGRVVFGVRNAKTGAAGSLMDVLHYPGMNHRVEITEGILADECAALLCYFFRMPRQVFNAQKKAQSSTDGSSGSSGSETPGTSESATPESSGGSSIKKYPKLESEFVYGDYKVYDVRKMIAKSEQEIGKATAKYFFYSNIMNFFKTEITLANGEIRKRPLIETNGETGEIVWDKGRDFATVRKVLSMPQVNIVKKTEVQTGGFSKESILPKRNSDKLIARKKDWDPKKYGGFDSPTVAYSVLVVAKVEKGKSKKLKSVKELLGITIMERSSFEKNPIDFLEAKGYKEVKKDLIIKLPKYSLFELENGRKRMLASAGELQKGNELALPSKYVNFLYLASHYEKLKGSPEDNEQKQLFVEQHKHYLDEIIEQISEFSKRVILADANLDKVLSAYNKHRDKPIREQAENIIHLFTLTNLGAPAAFKYFDTTIDRKRYTSTKEVLDATLIHQSITGLYETRIDLSQLGGD

SEQ ID NO: 298 - protein, 1421 aa, Artificial Sequence
  Description of artificial sequence: 112 delta HNH TadA polypeptide sequence
MDKKYSIGLAIGTNSVGWAVITDEYKVPSKKFKVLGNTDRHSIKKNLIGALLFDSGETAEATRLKRTARRRYTRRKNRICYLQEIFSNEMAKVDDSFFHRLEESFLVEEDKKHERHPIFGNIVDEVAYHEKYPTIYHLRKKLVDSTDKADLRLIYLALAHMIKFRGHFLIEGDLNPDNSDVDKLFIQLVQTYNQLFEENPINASGVDAKAILSARLSKSRRLENLIAQLPGEKKNGLFGNLIALSLGLTPNFKSNFDLAEDAKLQLSKDTYDDDLDNLLAQIGDQYADLFLAAKNLSDAILLSDILRVNTEITKAPLSASMIKRYDEHHQDLTLLKALVRQQLPEKYKEIFFDQSKNGYAGYIDGGASQEEFYKFIKPILEKMDGTEELLVKLNREDLLRKQRTFDNGSIPHQIHLGELHAILRRQEDFYPFLKDNREKIEKILTFRIPYYVGPLARGNSRFAWMTRKSEETITPWNFEEVVDKGASAQSFIERMTNFDKNLPNEKVLPKHSLLYEYFTVYNELTKVKYVTEGMRKPAFLSGEQKKAIVDLLFKTNRKVTVKQLKEDYFKKIECFDSVEISGVEDRFNASLGTYHDLLKIIKDKDFLDNEENEDILEDIVLTLTLFEDREMIEERLKTYAHLFDDKVMKQLKRRRYTGWGRLSRKLINGIRDKQSGKTILDFLKSDGFANRNFMQLIHDDSLTFKEDIQKAQVSGQGDSLHEHIANLAGSPAIKKGILQTVKVVDELVKVMGRHKPENIVIEMARENQTTQKGQKNSRERMKRIEEGIKELGSEVEFSHEYWMRHALTLAKRARDEREVPVGAVLVLNNRVIGEGWNRAIGLHDPTAHAEIMALRQGGLVMQNYRLIDATLYVTFEPCVMCAGAMIHSRIGRVVFGVRNAKTGAAGSLMDVLHYPGMNHRVEITEGILADECAALLCYFFRMPRQVFNAQKKAQSSTDGGLSELDKAGFIKRQLVETRQITKHVAQILDSRMNTKYDENDKLIREVKVITLKSKLVSDFRKDFQFYKVREINNYHHAHDAYLNAVVGTALIKKYPKLESEFVYGDYKVYDVRKMIAKSEQEIGKATAKYFFYSNIMNFFKTEITLANGEIRKRPLIETNGETGEIVWDKGRDFATVRKVLSMPQVNIVKKTEVQTGGFSKESILPKRNSDKLIARKKDWDPKKYGGFDSPTVAYSVLVVAKVEKGKSKKLKSVKELLGITIMERSSFEKNPIDFLEAKGYKEVKKDLIIKLPKYSLFELENGRKRMLASAGELQKGNELALPSKYVNFLYLASHYEKLKGSPEDNEQKQLFVEQHKHYLDEIIEQISEFSKRVILADANLDKVLSAYNKHRDKPIREQAENIIHLFTLTNLGAPAAFKYFDTTIDRKRYTSTKEVLDATLIHQSITGLYETRIDLSQLGGD

SEQ ID NO: 299 - protein, 1552 aa, Artificial Sequence
  Description of artificial sequence: 113 N-term single TadA helix trunc 165-end polypeptide sequence
MSEVEFSHEYWMRHALTLAKRARDEREVPVGAVLVLNNRVIGEGWNRAIGLHDPTAHAEIMALRQGGLVMQNYRLIDATLYVTFEPCVMCAGAMIHSRIGRVVFGVRNAKTGAAGSLMDVLHYPGMNHRVEITEGILADECAALLCYFFRMPRSGGSSGGSSGSETPGTSESATPESSGGSSGGSDKKYSIGLAIGTNSVGWAVITDEYKVPSKKFKVLGNTDRHSIKKNLIGALLFDSGETAEATRLKRTARRRYTRRKNRICYLQEIFSNEMAKVDDSFFHRLEESFLVEEDKKHERHPIFGNIVDEVAYHEKYPTIYHLRKKLVDSTDKADLRLIYLALAHMIKFRGHFLIEGDLNPDNSDVDKLFIQLVQTYNQLFEENPINASGVDAKAILSARLSKSRRLENLIAQLPGEKKNGLFGNLIALSLGLTPNFKSNFDLAEDAKLQLSKDTYDDDLDNLLAQIGDQYADLFLAAKNLSDAILLSDILRVNTEITKAPLSASMIKRYDEHHQDLTLLKALVRQQLPEKYKEIFFDQSKNGYAGYIDGGASQEEFYKFIKPILEKMDGTEELLVKLNREDLLRKQRTFDNGSIPHQIHLGELHAILRRQEDFYPFLKDNREKIEKILTFRIPYYVGPLARGNSRFAWMTRKSEETITPWNFEEVVDKGASAQSFIERMTNFDKNLPNEKVLPKHSLLYEYFTVYNELTKVKYVTEGMRKPAFLSGEQKKAIVDLLFKTNRKVTVKQLKEDYFKKIECFDSVEISGVEDRFNASLGTYHDLLKIIKDKDFLDNEENEDILEDIVLTLTLFEDREMIEERLKTYAHLFDDKVMKQLKRRRYTGWGRLSRKLINGIRDKQSGKTILDFLKSDGFANRNFMQLIHDDSLTFKEDIQKAQVSGQGDSLHEHIANLAGSPAIKKGILQTVKVVDELVKVMGRHKPENIVIEMARENQTTQKGQKNSRERMKRIEEGIKELGSQILKEHPVENTQLQNEKLYLYYLQNGRDMYVDQELDINRLSDYDVDHIVPQSFLKDDSIDNKVLTRSDKNRGKSDNVPSEEVVKKMKNYWRQLLNAKLITQRKFDNLTKAERGGLSELDKAGFIKRQLVETRQITKHVAQILDSRMNTKYDENDKLIREVKVITLKSKLVSDFRKDFQFYKVREINNYHHAHDAYLNAVVGTALIKKYPKLESEFVYGDYKVYDVRKMIAKSEQEIGKATAKYFFYSNIMNFFKTEITLANGEIRKRPLIETNGETGEIVWDKGRDFATVRKVLSMPQVNIVKKTEVQTGGFSKESILPKRNSDKLIARKKDWDPKKYGGFDSPTVAYSVLVVAKVEKGKSKKLKSVKELLGITIMERSSFEKNPIDFLEAKGYKEVKKDLIIKLPKYSLFELENGRKRMLASAGELQKGNELALPSKYVNFLYLASHYEKLKGSPEDNEQKQLFVEQHKHYLDEIIEQISEFSKRVILADANLDKVLSAYNKHRDKPIREQAENIIHLFTLTNLGAPAAFKYFDTTIDRKRYTSTKEVLDATLIHQSITGLYETRIDLSQLGGD

SEQ ID NO: 300 - protein, 1545 aa, Artificial Sequence
  Description of artificial sequence: 114 N-term single TadA helix trunc 165-end delta 59-65 polypeptide sequence
MSEVEFSHEYWMRHALTLAKRARDEREVPVGAVLVLNNRVIGEGWNRTAHAEIMALRQGGLVMQNYRLIDATLYVTFEPCVMCAGAMIHSRIGRVVFGVRNAKTGAAGSLMDVLHYPGMNHRVEITEGILADECAALLCYFFRMPRSGGSSGGSSGSETPGTSESATPESSGGSSGGSDKKYSIGLAIGTNSVGWAVITDEYKVPSKKFKVLGNTDRHSIKKNLIGALLFDSGETAEATRLKRTARRRYTRRKNRICYLQEIFSNEMAKVDDSFFHRLEESFLVEEDKKHERHPIFGNIVDEVAYHEKYPTIYHLRKKLVDSTDKADLRLIYLALAHMIKFRGHFLIEGDLNPDNSDVDKLFIQLVQTYNQLFEENPINASGVDAKAILSARLSKSRRLENLIAQLPGEKKNGLFGNLIALSLGLTPNFKSNFDLAEDAKLQLSKDTYDDDLDNLLAQIGDQYADLFLAAKNLSDAILLSDILRVNTEITKAPLSASMIKRYDEHHQDLTLLKALVRQQLPEKYKEIFFDQSKNGYAGYIDGGASQEEFYKFIKPILEKMDGTEELLVKLNREDLLRKQRTFDNGSIPHQIHLGELHAILRRQEDFYPFLKDNREKIEKILTFRIPYYVGPLARGNSRFAWMTRKSEETITPWNFEEVVDKGASAQSFIERMTNFDKNLPNEKVLPKHSLLYEYFTVYNELTKVKYVTEGMRKPAFLSGEQKKAIVDLLFKTNRKVTVKQLKEDYFKKIECFDSVEISGVEDRFNASLGTYHDLLKIIKDKDFLDNEENEDILEDIVLTLTLFEDREMIEERLKTYAHLFDDKVMKQLKRRRYTGWGRLSRKLINGIRDKQSGKTILDFLKSDGFANRNFMQLIHDDSLTFKEDIQKAQVSGQGDSLHEHIANLAGSPAIKKGILQTVKVVDELVKVMGRHKPENIVIEMARENQTTQKGQKNSRERMKRIEEGIKELGSQILKEHPVENTQLQNEKLYLYYLQNGRDMYVDQELDINRLSDYDVDHIVPQSFLKDDSIDNKVLTRSDKNRGKSDNVPSEEVVKKMKNYWRQLLNAKLITQRKFDNLTKAERGGLSELDKAGFIKRQLVETRQITKHVAQILDSRMNTKYDENDKLIREVKVITLKSKLVSDFRKDFQFYKVREINNYHHAHDAYLNAVVGTALIKKYPKLESEFVYGDYKVYDVRKMIAKSEQEIGKATAKYFFYSNIMNFFKTEITLANGEIRKRPLIETNGETGEIVWDKGRDFATVRKVLSMPQVNIVKKTEVQTGGFSKESILPKRNSDKLIARKKDWDPKKYGGFDSPTVAYSVLVVAKVEKGKSKKLKSVKELLGITIMERSSFEKNPIDFLEAKGYKEVKKDLIIKLPKYSLFELENGRKRMLASAGELQKGNELALPSKYVNFLYLASHYEKLKGSPEDNEQKQLFVEQHKHYLDEIIEQISEFSKRVILADANLDKVLSAYNKHRDKPIREQAENIIHLFTLTNLGAPAAFKYFDTTIDRKRYTSTKEVLDATLIHQSITGLYETRIDLSQLGGD

SEQ ID NO: 301 - protein, 1541 aa, Artificial Sequence
  Description of artificial sequence: 115.1 Cas9 TadAins1004 polypeptide sequence
MDKKYSIGLAIGTNSVGWAVITDEYKVPSKKFKVLGNTDRHSIKKNLIGALLFDSGETAEATRLKRTARRRYTRRKNRICYLQEIFSNEMAKVDDSFFHRLEESFLVEEDKKHERHPIFGNIVDEVAYHEKYPTIYHLRKKLVDSTDKADLRLIYLALAHMIKFRGHFLIEGDLNPDNSDVDKLFIQLVQTYNQLFEENPINASGVDAKAILSARLSKSRRLENLIAQLPGEKKNGLFGNLIALSLGLTPNFKSNFDLAEDAKLQLSKDTYDDDLDNLLAQIGDQYADLFLAAKNLSDAILLSDILRVNTEITKAPLSASMIKRYDEHHQDLTLLKALVRQQLPEKYKEIFFDQSKNGYAGYIDGGASQEEFYKFIKPILEKMDGTEELLVKLNREDLLRKQRTFDNGSIPHQIHLGELHAILRRQEDFYPFLKDNREKIEKILTFRIPYYVGPLARGNSRFAWMTRKSEETITPWNFEEVVDKGASAQSFIERMTNFDKNLPNEKVLPKHSLLYEYFTVYNELTKVKYVTEGMRKPAFLSGEQKKAIVDLLFKTNRKVTVKQLKEDYFKKIECFDSVEISGVEDRFNASLGTYHDLLKIIKDKDFLDNEENEDILEDIVLTLTLFEDREMIEERLKTYAHLFDDKVMKQLKRRRYTGWGRLSRKLINGIRDKQSGKTILDFLKSDGFANRNFMQLIHDDSLTFKEDIQKAQVSGQGDSLHEHIANLAGSPAIKKGILQTVKVVDELVKVMGRHKPENIVIEMARENQTTQKGQKNSRERMKRIEEGIKELGSQILKEHPVENTQLQNEKLYLYYLQNGRDMYVDQELDINRLSDYDVDHIVPQSFLKDDSIDNKVLTRSDKNRGKSDNVPSEEVVKKMKNYWRQLLNAKLITQRKFDNLTKAERGGLSELDKAGFIKRQLVETRQITKHVAQILDSRMNTKYDENDKLIREVKVITLKSKLVSDFRKDFQFYKVREINNYHHAHDAYLNAVVGTALIKKYPKGSSGSETPGTSESATPESSGSEVEFSHEYWMRHALTLAKRARDEREVPVGAVLVLNNRVIGEGWNRAIGLHDPTAHAEIMALRQGGLVMQNYRLIDATLYVTFEPCVMCAGAMIHSRIGRVVFGVRNAKTGAAGSLMDVLHYPGMNHRVEITEGILADECAALLCYFFRMPRQLESEFVYGDYKVYDVRKMIAKSEQEIGKATAKYFFYSNIMNFFKTEITLANGEIRKRPLIETNGETGEIVWDKGRDFATVRKVLSMPQVNIVKKTEVQTGGFSKESILPKRNSDKLIARKKDWDPKKYGGFDSPTVAYSVLVVAKVEKGKSKKLKSVKELLGITIMERSSFEKNPIDFLEAKGYKEVKKDLIIKLPKYSLFELENGRKRMLASAGELQKGNELALPSKYVNFLYLASHYEKLKGSPEDNEQKQLFVEQHKHYLDEIIEQISEFSKRVILADANLDKVLSAYNKHRDKPIREQAENIIHLFTLTNLGAPAAFKYFDTTIDRKRYTSTKEVLDATLIHQSITGLYETRIDLSQLGGD

SEQ ID NO: 302 - protein, 1541 aa, Artificial Sequence
  Description of artificial sequence: 115.2 Cas9 TadAins1005 polypeptide sequence
MDKKYSIGLAIGTNSVGWAVITDEYKVPSKKFKVLGNTDRHSIKKNLIGALLFDSGETAEATRLKRTARRRYTRRKNRICYLQEIFSNEMAKVDDSFFHRLEESFLVEEDKKHERHPIFGNIVDEVAYHEKYPTIYHLRKKLVDSTDKADLRLIYLALAHMIKFRGHFLIEGDLNPDNSDVDKLFIQLVQTYNQLFEENPINASGVDAKAILSARLSKSRRLENLIAQLPGEKKNGLFGNLIALSLGLTPNFKSNFDLAEDAKLQLSKDTYDDDLDNLLAQIGDQYADLFLAAKNLSDAILLSDILRVNTEITKAPLSASMIKRYDEHHQDLTLLKALVRQQLPEKYKEIFFDQSKNGYAGYIDGGASQEEFYKFIKPILEKMDGTEELLVKLNREDLLRKQRTFDNGSIPHQIHLGELHAILRRQEDFYPFLKDNREKIEKILTFRIPYYVGPLARGNSRFAWMTRKSEETITPWNFEEVVDKGASAQSFIERMTNFDKNLPNEKVLPKHSLLYEYFTVYNELTKVKYVTEGMRKPAFLSGEQKKAIVDLLFKTNRKVTVKQLKEDYFKKIECFDSVEISGVEDRFNASLGTYHDLLKIIKDKDFLDNEENEDILEDIVLTLTLFEDREMIEERLKTYAHLFDDKVMKQLKRRRYTGWGRLSRKLINGIRDKQSGKTILDFLKSDGFANRNFMQLIHDDSLTFKEDIQKAQVSGQGDSLHEHIANLAGSPAIKKGILQTVKVVDELVKVMGRHKPENIVIEMARENQTTQKGQKNSRERMKRIEEGIKELGSQILKEHPVENTQLQNEKLYLYYLQNGRDMYVDQELDINRLSDYDVDHIVPQSFLKDDSIDNKVLTRSDKNRGKSDNVPSEEVVKKMKNYWRQLLNAKLITQRKFDNLTKAERGGLSELDKAGFIKRQLVETRQITKHVAQILDSRMNTKYDENDKLIREVKVITLKSKLVSDFRKDFQFYKVREINNYHHAHDAYLNAVVGTALIKKYPKLGSSGSETPGTSESATPESSGSEVEFSHEYWMRHALTLAKRARDEREVPVGAVLVLNNRVIGEGWNRAIGLHDPTAHAEIMALRQGGLVMQNYRLIDATLYVTFEPCVMCAGAMIHSRIGRVVFGVRNAKTGAAGSLMDVLHYPGMNHRVEITEGILADECAALLCYFFRMPRQESEFVYGDYKVYDVRKMIAKSEQEIGKATAKYFFYSNIMNFFKTEITLANGEIRKRPLIETNGETGEIVWDKGRDFATVRKVLSMPQVNIVKKTEVQTGGFSKESILPKRNSDKLIARKKDWDPKKYGGFDSPTVAYSVLVVAKVEKGKSKKLKSVKELLGITIMERSSFEKNPIDFLEAKGYKEVKKDLIIKLPKYSLFELENGRKRMLASAGELQKGNELALPSKYVNFLYLASHYEKLKGSPEDNEQKQLFVEQHKHYLDEIIEQISEFSKRVILADANLDKVLSAYNKHRDKPIREQAENIIHLFTLTNLGAPAAFKYFDTTIDRKRYTSTKEVLDATLIHQSITGLYETRIDLSQLGGD

SEQ ID NO: 303 - protein, 1541 aa, Artificial Sequence
  Description of artificial sequence: 115.3 Cas9 TadAins1006 polypeptide sequence
MDKKYSIGLAIGTNSVGWAVITDEYKVPSKKFKVLGNTDRHSIKKNLIGALLFDSGETAEATRLKRTARRRYTRRKNRICYLQEIFSNEMAKVDDSFFHRLEESFLVEEDKKHERHPIFGNIVDEVAYHEKYPTIYHLRKKLVDSTDKADLRLIYLALAHMIKFRGHFLIEGDLNPDNSDVDKLFIQLVQTYNQLFEENPINASGVDAKAILSARLSKSRRLENLIAQLPGEKKNGLFGNLIALSLGLTPNFKSNFDLAEDAKLQLSKDTYDDDLDNLLAQIGDQYADLFLAAKNLSDAILLSDILRVNTEITKAPLSASMIKRYDEHHQDLTLLKALVRQQLPEKYKEIFFDQSKNGYAGYIDGGASQEEFYKFIKPILEKMDGTEELLVKLNREDLLRKQRTFDNGSIPHQIHLGELHAILRRQEDFYPFLKDNREKIEKILTFRIPYYVGPLARGNSRFAWMTRKSEETITPWNFEEVVDKGASAQSFIERMTNFDKNLPNEKVLPKHSLLYEYFTVYNELTKVKYVTEGMRKPAFLSGEQKKAIVDLLFKTNRKVTVKQLKEDYFKKIECFDSVEISGVEDRFNASLGTYHDLLKIIKDKDFLDNEENEDILEDIVLTLTLFEDREMIEERLKTYAHLFDDKVMKQLKRRRYTGWGRLSRKLINGIRDKQSGKTILDFLKSDGFANRNFMQLIHDDSLTFKEDIQKAQVSGQGDSLHEHIANLAGSPAIKKGILQTVKVVDELVKVMGRHKPENIVIEMARENQTTQKGQKNSRERMKRIEEGIKELGSQILKEHPVENTQLQNEKLYLYYLQNGRDMYVDQELDINRLSDYDVDHIVPQSFLKDDSIDNKVLTRSDKNRGKSDNVPSEEVVKKMKNYWRQLLNAKLITQRKFDNLTKAERGGLSELDKAGFIKRQLVETRQITKHVAQILDSRMNTKYDENDKLIREVKVITLKSKLVSDFRKDFQFYKVREINNYHHAHDAYLNAVVGTALIKKYPKLEGSSGSETPGTSESATPESSGSEVEFSHEYWMRHALTLAKRARDEREVPVGAVLVLNNRVIGEGWNRAIGLHDPTAHAEIMALRQGGLVMQNYRLIDATLYVTFEPCVMCAGAMIHSRIGRVVFGVRNAKTGAAGSLMDVLHYPGMNHRVEITEGILADECAALLCYFFRMPRQSEFVYGDYKVYDVRKMIAKSEQEIGKATAKYFFYSNIMNFFKTEITLANGEIRKRPLIETNGETGEIVWDKGRDFATVRKVLSMPQVNIVKKTEVQTGGFSKESILPKRNSDKLIARKKDWDPKKYGGFDSPTVAYSVLVVAKVEKGKSKKLKSVKELLGITIMERSSFEKNPIDFLEAKGYKEVKKDLIIKLPKYSLFELENGRKRMLASAGELQKGNELALPSKYVNFLYLASHYEKLKGSPEDNEQKQLFVEQHKHYLDEIIEQISEFSKRVILADANLDKVLSAYNKHRDKPIREQAENIIHLFTLTNLGAPAAFKYFDTTIDRKRYTSTKEVLDATLIHQSITGLYETRIDLSQLGGD

SEQ ID NO: 304 - protein, 1541 aa, Artificial Sequence
  Description of artificial sequence: 115.4 Cas9 TadAins1007 polypeptide sequence
MDKKYSIGLAIGTNSVGWAVITDEYKVPSKKFKVLGNTDRHSIKKNLIGALLFDSGETAEATRLKRTARRRYTRRKNRICYLQEIFSNEMAKVDDSFFHRLEESFLVEEDKKHERHPIFGNIVDEVAYHEKYPTIYHLRKKLVDSTDKADLRLIYLALAHMIKFRGHFLIEGDLNPDNSDVDKLFIQLVQTYNQLFEENPINASGVDAKAILSARLSKSRRLENLIAQLPGEKKNGLFGNLIALSLGLTPNFKSNFDLAEDAKLQLSKDTYDDDLDNLLAQIGDQYADLFLAAKNLSDAILLSDILRVNTEITKAPLSASMIKRYDEHHQDLTLLKALVRQQLPEKYKEIFFDQSKNGYAGYIDGGASQEEFYKFIKPILEKMDGTEELLVKLNREDLLRKQRTFDNGSIPHQIHLGELHAILRRQEDFYPFLKDNREKIEKILTFRIPYYVGPLARGNSRFAWMTRKSEETITPWNFEEVVDKGASAQSFIERMTNFDKNLPNEKVLPKHSLLYEYFTVYNELTKVKYVTEGMRKPAFLSGEQKKAIVDLLFKTNRKVTVKQLKEDYFKKIECFDSVEISGVEDRFNASLGTYHDLLKIIKDKDFLDNEENEDILEDIVLTLTLFEDREMIEERLKTYAHLFDDKVMKQLKRRRYTGWGRLSRKLINGIRDKQSGKTILDFLKSDGFANRNFMQLIHDDSLTFKEDIQKAQVSGQGDSLHEHIANLAGSPAIKKGILQTVKVVDELVKVMGRHKPENIVIEMARENQTTQKGQKNSRERMKRIEEGIKELGSQILKEHPVENTQLQNEKLYLYYLQNGRDMYVDQELDINRLSDYDVDHIVPQSFLKDDSIDNKVLTRSDKNRGKSDNVPSEEVVKKMKNYWRQLLNAKLITQRKFDNLTKAERGGLSELDKAGFIKRQLVETRQITKHVAQILDSRMNTKYDENDKLIREVKVITLKSKLVSDFRKDFQFYKVREINNYHHAHDAYLNAVVGTALIKKYPKLESGSSGSETPGTSESATPESSGSEVEFSHEYWMRHALTLAKRARDEREVPVGAVLVLNNRVIGEGWNRAIGLHDPTAHAEIMALRQGGLVMQNYRLIDATLYVTFEPCVMCAGAMIHSRIGRVVFGVRNAKTGAAGSLMDVLHYPGMNHRVEITEGILADECAALLCYFFRMPRQEFVYGDYKVYDVRKMIAKSEQEIGKATAKYFFYSNIMNFFKTEITLANGEIRKRPLIETNGETGEIVWDKGRDFATVRKVLSMPQVNIVKKTEVQTGGFSKESILPKRNSDKLIARKKDWDPKKYGGFDSPTVAYSVLVVAKVEKGKSKKLKSVKELLGITIMERSSFEKNPIDFLEAKGYKEVKKDLIIKLPKYSLFELENGRKRMLASAGELQKGNELALPSKYVNFLYLASHYEKLKGSPEDNEQKQLFVEQHKHYLDEIIEQISEFSKRVILADANLDKVLSAYNKHRDKPIREQAENIIHLFTLTNLGAPAAFKYFDTTIDRKRYTSTKEVLDATLIHQSITGLYETRIDLSQLGGD

SEQ ID NO: 305 - protein, 1541 aa, Artificial Sequence
  Description of artificial sequence: 116.1 Cas9 TadAins C-term truncate2 792 polypeptide sequence
MDKKYSIGLAIGTNSVGWAVITDEYKVPSKKFKVLGNTDRHSIKKNLIGALLFDSGETAEATRLKRTARRRYTRRKNRICYLQEIFSNEMAKVDDSFFHRLEESFLVEEDKKHERHPIFGNIVDEVAYHEKYPTIYHLRKKLVDSTDKADLRLIYLALAHMIKFRGHFLIEGDLNPDNSDVDKLFIQLVQTYNQLFEENPINASGVDAKAILSARLSKSRRLENLIAQLPGEKKNGLFGNLIALSLGLTPNFKSNFDLAEDAKLQLSKDTYDDDLDNLLAQIGDQYADLFLAAKNLSDAILLSDILRVNTEITKAPLSASMIKRYDEHHQDLTLLKALVRQQLPEKYKEIFFDQSKNGYAGYIDGGASQEEFYKFIKPILEKMDGTEELLVKLNREDLLRKQRTFDNGSIPHQIHLGELHAILRRQEDFYPFLKDNREKIEKILTFRIPYYVGPLARGNSRFAWMTRKSEETITPWNFEEVVDKGASAQSFIERMTNFDKNLPNEKVLPKHSLLYEYFTVYNELTKVKYVTEGMRKPAFLSGEQKKAIVDLLFKTNRKVTVKQLKEDYFKKIECFDSVEISGVEDRFNASLGTYHDLLKIIKDKDFLDNEENEDILEDIVLTLTLFEDREMIEERLKTYAHLFDDKVMKQLKRRRYTGWGRLSRKLINGIRDKQSGKTILDFLKSDGFANRNFMQLIHDDSLTFKEDIQKAQVSGQGDSLHEHIANLAGSPAIKKGILQTVKVVDELVKVMGRHKPENIVIEMARENQTTQKGQKNSRERMKRIEEGIKELGGSSGSETPGTSESATPESSGSEVEFSHEYWMRHALTLAKRARDEREVPVGAVLVLNNRVIGEGWNRAIGLHDPTAHAEIMALRQGGLVMQNYRLIDATLYVTFEPCVMCAGAMIHSRIGRVVFGVRNAKTGAAGSLMDVLHYPGMNHRVEITEGILADECAALLCYFFRMPRQSQILKEHPVENTQLQNEKLYLYYLQNGRDMYVDQELDINRLSDYDVDHIVPQSFLKDDSIDNKVLTRSDKNRGKSDNVPSEEVVKKMKNYWRQLLNAKLITQRKFDNLTKAERGGLSELDKAGFIKRQLVETRQITKHVAQILDSRMNTKYDENDKLIREVKVITLKSKLVSDFRKDFQFYKVREINNYHHAHDAYLNAVVGTALIKKYPKLESEFVYGDYKVYDVRKMIAKSEQEIGKATAKYFFYSNIMNFFKTEITLANGEIRKRPLIETNGETGEIVWDKGRDFATVRKVLSMPQVNIVKKTEVQTGGFSKESILPKRNSDKLIARKKDWDPKKYGGFDSPTVAYSVLVVAKVEKGKSKKLKSVKELLGITIMERSSFEKNPIDFLEAKGYKEVKKDLIIKLPKYSLFELENGRKRMLASAGELQKGNELALPSKYVNFLYLASHYEKLKGSPEDNEQKQLFVEQHKHYLDEIIEQISEFSKRVILADANLDKVLSAYNKHRDKPIREQAENIIHLFTLTNLGAPAAFKYFDTTIDRKRYTSTKEVLDATLIHQSITGLYETRIDLSQLGGD

SEQ ID NO: 306 - protein, 1541 aa, Artificial Sequence
  Description of artificial sequence: 116.2 Cas9 TadAins C-term truncate2 791 polypeptide sequence
MDKKYSIGLAIGTNSVGWAVITDEYKVPSKKFKVLGNTDRHSIKKNLIGALLFDSGETAEATRLKRTARRRYTRRKNRICYLQEIFSNEMAKVDDSFFHRLEESFLVEEDKKHERHPIFGNIVDEVAYHEKYPTIYHLRKKLVDSTDKADLRLIYLALAHMIKFRGHFLIEGDLNPDNSDVDKLFIQLVQTYNQLFEENPINASGVDAKAILSARLSKSRRLENLIAQLPGEKKNGLFGNLIALSLGLTPNFKSNFDLAEDAKLQLSKDTYDDDLDNLLAQIGDQYADLFLAAKNLSDAILLSDILRVNTEITKAPLSASMIKRYDEHHQDLTLLKALVRQQLPEKYKEIFFDQSKNGYAGYIDGGASQEEFYKFIKPILEKMDGTEELLVKLNREDLLRKQRTFDNGSIPHQIHLGELHAILRRQEDFYPFLKDNREKIEKILTFRIPYYVGPLARGNSRFAWMTRKSEETITPWNFEEVVDKGASAQSFIERMTNFDKNLPNEKVLPKHSLLYEYFTVYNELTKVKYVTEGMRKPAFLSGEQKKAIVDLLFKTNRKVTVKQLKEDYFKKIECFDSVEISGVEDRFNASLGTYHDLLKIIKDKDFLDNEENEDILEDIVLTLTLFEDREMIEERLKTYAHLFDDKVMKQLKRRRYTGWGRLSRKLINGIRDKQSGKTILDFLKSDGFANRNFMQLIHDDSLTFKEDIQKAQVSGQGDSLHEHIANLAGSPAIKKGILQTVKVVDELVKVMGRHKPENIVIEMARENQTTQKGQKNSRERMKRIEEGIKELGSSGSETPGTSESATPESSGSEVEFSHEYWMRHALTLAKRARDEREVPVGAVLVLNNRVIGEGWNRAIGLHDPTAHAEIMALRQGGLVMQNYRLIDATLYVTFEPCVMCAGAMIHSRIGRVVFGVRNAKTGAAGSLMDVLHYPGMNHRVEITEGILADECAALLCYFFRMPRQGSQILKEHPVENTQLQNEKLYLYYLQNGRDMYVDQELDINRLSDYDVDHIVPQSFLKDDSIDNKVLTRSDKNRGKSDNVPSEEVVKKMKNYWRQLLNAKLITQRKFDNLTKAERGGLSELDKAGFIKRQLVETRQITKHVAQILDSRMNTKYDENDKLIREVKVITLKSKLVSDFRKDFQFYKVREINNYHHAHDAYLNAVVGTALIKKYPKLESEFVYGDYKVYDVRKMIAKSEQEIGKATAKYFFYSNIMNFFKTEITLANGEIRKRPLIETNGETGEIVWDKGRDFATVRKVLSMPQVNIVKKTEVQTGGFSKESILPKRNSDKLIARKKDWDPKKYGGFDSPTVAYSVLVVAKVEKGKSKKLKSVKELLGITIMERSSFEKNPIDFLEAKGYKEVKKDLIIKLPKYSLFELENGRKRMLASAGELQKGNELALPSKYVNFLYLASHYEKLKGSPEDNEQKQLFVEQHKHYLDEIIEQISEFSKRVILADANLDKVLSAYNKHRDKPIREQAENIIHLFTLTNLGAPAAFKYFDTTIDRKRYTSTKEVLDATLIHQSITGLYETRIDLSQLGGD

SEQ ID NO: 307 - protein, 1541 aa, Artificial Sequence
  Description of artificial sequence: 116.3 Cas9 TadAins C-term truncate2 790 polypeptide sequence
MDKKYSIGLAIGTNSVGWAVITDEYKVPSKKFKVLGNTDRHSIKKNLIGALLFDSGETAEATRLKRTARRRYTRRKNRICYLQEIFSNEMAKVDDSFFHRLEESFLVEEDKKHERHPIFGNIVDEVAYHEKYPTIYHLRKKLVDSTDKADLRLIYLALAHMIKFRGHFLIEGDLNPDNSDVDKLFIQLVQTYNQLFEENPINASGVDAKAILSARLSKSRRLENLIAQLPGEKKNGLFGNLIALSLGLTPNFKSNFDLAEDAKLQLSKDTYDDDLDNLLAQIGDQYADLFLAAKNLSDAILLSDILRVNTEITKAPLSASMIKRYDEHHQDLTLLKALVRQQLPEKYKEIFFDQSKNGYAGYIDGGASQEEFYKFIKPILEKMDGTEELLVKLNREDLLRKQRTFDNGSIPHQIHLGELHAILRRQEDFYPFLKDNREKIEKILTFRIPYYVGPLARGNSRFAWMTRKSEETITPWNFEEVVDKGASAQSFIERMTNFDKNLPNEKVLPKHSLLYEYFTVYNELTKVKYVTEGMRKPAFLSGEQKKAIVDLLFKTNRKVTVKQLKEDYFKKIECFDSVEISGVEDRFNASLGTYHDLLKIIKDKDFLDNEENEDILEDIVLTLTLFEDREMIEERLKTYAHLFDDKVMKQLKRRRYTGWGRLSRKLINGIRDKQSGKTILDFLKSDGFANRNFMQLIHDDSLTFKEDIQKAQVSGQGDSLHEHIANLAGSPAIKKGILQTVKVVDELVKVMGRHKPENIVIEMARENQTTQKGQKNSRERMKRIEEGIKEGSSGSETPGTSESATPESSGSEVEFSHEYWMRHALTLAKRARDEREVPVGAVLVLNNRVIGEGWNRAIGLHDPTAHAEIMALRQGGLVMQNYRLIDATLYVTFEPCVMCAGAMIHSRIGRVVFGVRNAKTGAAGSLMDVLHYPGMNHRVEITEGILADECAALLCYFFRMPRQLGSQILKEHPVENTQLQNEKLYLYYLQNGRDMYVDQELDINRLSDYDVDHIVPQSFLKDDSIDNKVLTRSDKNRGKSDNVPSEEVVKKMKNYWRQLLNAKLITQRKFDNLTKAERGGLSELDKAGFIKRQLVETRQITKHVAQILDSRMNTKYDENDKLIREVKVITLKSKLVSDFRKDFQFYKVREINNYHHAHDAYLNAVVGTALIKKYPKLESEFVYGDYKVYDVRKMIAKSEQEIGKATAKYFFYSNIMNFFKTEITLANGEIRKRPLIETNGETGEIVWDKGRDFATVRKVLSMPQVNIVKKTEVQTGGFSKESILPKRNSDKLIARKKDWDPKKYGGFDSPTVAYSVLVVAKVEKGKSKKLKSVKELLGITIMERSSFEKNPIDFLEAKGYKEVKKDLIIKLPKYSLFELENGRKRMLASAGELQKGNELALPSKYVNFLYLASHYEKLKGSPEDNEQKQLFVEQHKHYLDEIIEQISEFSKRVILADANLDKVLSAYNKHRDKPIREQAENIIHLFTLTNLGAPAAFKYFDTTIDRKRYTSTKEVLDATLIHQSITGLYETRIDLSQLGGD

SEQ ID NO: 308 - protein, 1484 aa, Artificial Sequence
  Description of artificial sequence: 117 Cas9 delta 1017-1069 polypeptide sequence
MDKKYSIGLAIGTNSVGWAVITDEYKVPSKKFKVLGNTDRHSIKKNLIGALLFDSGETAEATRLKRTARRRYTRRKNRICYLQEIFSNEMAKVDDSFFHRLEESFLVEEDKKHERHPIFGNIVDEVAYHEKYPTIYHLRKKLVDSTDKADLRLIYLALAHMIKFRGHFLIEGDLNPDNSDVDKLFIQLVQTYNQLFEENPINASGVDAKAILSARLSKSRRLENLIAQLPGEKKNGLFGNLIALSLGLTPNFKSNFDLAEDAKLQLSKDTYDDDLDNLLAQIGDQYADLFLAAKNLSDAILLSDILRVNTEITKAPLSASMIKRYDEHHQDLTLLKALVRQQLPEKYKEIFFDQSKNGYAGYIDGGASQEEFYKFIKPILEKMDGTEELLVKLNREDLLRKQRTFDNGSIPHQIHLGELHAILRRQEDFYPFLKDNREKIEKILTFRIPYYVGPLARGNSRFAWMTRKSEETITPWNFEEVVDKGASAQSFIERMTNFDKNLPNEKVLPKHSLLYEYFTVYNELTKVKYVTEGMRKPAFLSGEQKKAIVDLLFKTNRKVTVKQLKEDYFKKIECFDSVEISGVEDRFNASLGTYHDLLKIIKDKDFLDNEENEDILEDIVLTLTLFEDREMIEERLKTYAHLFDDKVMKQLKRRRYTGWGRLSRKLINGIRDKQSGKTILDFLKSDGFANRNFMQLIHDDSLTFKEDIQKAQVSGQGDSLHEHIANLAGSPAIKKGILQTVKVVDELVKVMGRHKPENIVIEMARENQTTQKGQKNSRERMKRIEEGIKELGSQILKEHPVENTQLQNEKLYLYYLQNGRDMYVDQELDINRLSDYDVDHIVPQSFLKDDSIDNKVLTRSDKNRGKSDNVPSEEVVKKMKNYWRQLLNAKLITQRKFDNLTKAERGGLSELDKAGFIKRQLVETRQITKHVAQILDSRMNTKYDENDKLIREVKVITLKSKLVSDFRKDFQFYKVREINNYHHAHDAYLNAVVGTALIKKYPKLESEFVYGDYKVYSSGSEVEFSHEYWMRHALTLAKRARDEREVPVGAVLVLNNRVIGEGWNRAIGLHDPTAHAEIMALRQGGLVMQNYRLIDATLYVTFEPCVMCAGAMIHSRIGRVVFGVRNAKTGAAGSLMDVLHYPGMNHRVEITEGILADECAALLCYFFRMPRQVFNAQKKAQSSTDGEIVWDKGRDFATVRKVLSMPQVNIVKKTEVQTGGFSKESILPKRNSDKLIARKKDWDPKKYGGFDSPTVAYSVLVVAKVEKGKSKKLKSVKELLGITIMERSSFEKNPIDFLEAKGYKEVKKDLIIKLPKYSLFELENGRKRMLASAGELQKGNELALPSKYVNFLYLASHYEKLKGSPEDNEQKQLFVEQHKHYLDEIIEQISEFSKRVILADANLDKVLSAYNKHRDKPIREQAENIIHLFTLTNLGAPAAFKYFDTTIDRKRYTSTKEVLDATLIHQSITGLYETRIDLSQLGGD

SEQ ID NO: 309 - protein, 1554 aa, Artificial Sequence
  Description of artificial sequence: 118 Cas9 TadA-CP116ins 1067 polypeptide sequence
MDKKYSIGLAIGTNSVGWAVITDEYKVPSKKFKVLGNTDRHSIKKNLIGALLFDSGETAEATRLKRTARRRYTRRKNRICYLQEIFSNEMAKVDDSFFHRLEESFLVEEDKKHERHPIFGNIVDEVAYHEKYPTIYHLRKKLVDSTDKADLRLIYLALAHMIKFRGHFLIEGDLNPDNSDVDKLFIQLVQTYNQLFEENPINASGVDAKAILSARLSKSRRLENLIAQLPGEKKNGLFGNLIALSLGLTPNFKSNFDLAEDAKLQLSKDTYDDDLDNLLAQIGDQYADLFLAAKNLSDAILLSDILRVNTEITKAPLSASMIKRYDEHHQDLTLLKALVRQQLPEKYKEIFFDQSKNGYAGYIDGGASQEEFYKFIKPILEKMDGTEELLVKLNREDLLRKQRTFDNGSIPHQIHLGELHAILRRQEDFYPFLKDNREKIEKILTFRIPYYVGPLARGNSRFAWMTRKSEETITPWNFEEVVDKGASAQSFIERMTNFDKNLPNEKVLPKHSLLYEYFTVYNELTKVKYVTEGMRKPAFLSGEQKKAIVDLLFKTNRKVTVKQLKEDYFKKIECFDSVEISGVEDRFNASLGTYHDLLKIIKDKDFLDNEENEDILEDIVLTLTLFEDREMIEERLKTYAHLFDDKVMKQLKRRRYTGWGRLSRKLINGIRDKQSGKTILDFLKSDGFANRNFMQLIHDDSLTFKEDIQKAQVSGQGDSLHEHIANLAGSPAIKKGILQTVKVVDELVKVMGRHKPENIVIEMARENQTTQKGQKNSRERMKRIEEGIKELGSQILKEHPVENTQLQNEKLYLYYLQNGRDMYVDQELDINRLSDYDVDHIVPQSFLKDDSIDNKVLTRSDKNRGKSDNVPSEEVVKKMKNYWRQLLNAKLITQRKFDNLTKAERGGLSELDKAGFIKRQLVETRQITKHVAQILDSRMNTKYDENDKLIREVKVITLKSKLVSDFRKDFQFYKVREINNYHHAHDAYLNAVVGTALIKKYPKLESEFVYGDYKVYDVRKMIAKSEQEIGKATAKYFFYSNIMNFFKTEITLANGEIRKRPLIETNMNHRVEITEGILADECAALLCYFFRMPRQVFNAQKKAQSSTDGSSGSETPGTSESATPESSGSEVEFSHEYWMRHALTLAKRARDEREVPVGAVLVLNNRVIGEGWNRAIGLHDPTAHAEIMALRQGGLVMQNYRLIDATLYVTFEPCVMCAGAMIHSRIGRVVFGVRNAKTGAAGSLMDVLHYPGGETGEIVWDKGRDFATVRKVLSMPQVNIVKKTEVQTGGFSKESILPKRNSDKLIARKKDWDPKKYGGFDSPTVAYSVLVVAKVEKGKSKKLKSVKELLGITIMERSSFEKNPIDFLEAKGYKEVKKDLIIKLPKYSLFELENGRKRMLASAGELQKGNELALPSKYVNFLYLASHYEKLKGSPEDNEQKQLFVEQHKHYLDEIIEQISEFSKRVILADANLDKVLSAYNKHRDKPIREQAENIIHLFTLTNLGAPAAFKYFDTTIDRKRYTSTKEVLDATLIHQSITGLYETRIDLSQLGGD

SEQ ID NO: 310 - protein, 1554 aa, Artificial Sequence
  Description of artificial sequence: 119 Cas9 TadAins 701 polypeptide sequence
MDKKYSIGLAIGTNSVGWAVITDEYKVPSKKFKVLGNTDRHSIKKNLIGALLFDSGETAEATRLKRTARRRYTRRKNRICYLQEIFSNEMAKVDDSFFHRLEESFLVEEDKKHERHPIFGNIVDEVAYHEKYPTIYHLRKKLVDSTDKADLRLIYLALAHMIKFRGHFLIEGDLNPDNSDVDKLFIQLVQTYNQLFEENPINASGVDAKAILSARLSKSRRLENLIAQLPGEKKNGLFGNLIALSLGLTPNFKSNFDLAEDAKLQLSKDTYDDDLDNLLAQIGDQYADLFLAAKNLSDAILLSDILRVNTEITKAPLSASMIKRYDEHHQDLTLLKALVRQQLPEKYKEIFFDQSKNGYAGYIDGGASQEEFYKFIKPILEKMDGTEELLVKLNREDLLRKQRTFDNGSIPHQIHLGELHAILRRQEDFYPFLKDNREKIEKILTFRIPYYVGPLARGNSRFAWMTRKSEETITPWNFEEVVDKGASAQSFIERMTNFDKNLPNEKVLPKHSLLYEYFTVYNELTKVKYVTEGMRKPAFLSGEQKKAIVDLLFKTNRKVTVKQLKEDYFKKIECFDSVEISGVEDRFNASLGTYHDLLKIIKDKDFLDNEENEDILEDIVLTLTLFEDREMIEERLKTYAHLFDDKVMKQLKRRRYTGWGRLSRKLINGIRDKQSGKTILDFLKSDGFANRNFMQLIHDDSGSSGSETPGTSESATPESSGSEVEFSHEYWMRHALTLAKRARDEREVPVGAVLVLNNRVIGEGWNRAIGLHDPTAHAEIMALRQGGLVMQNYRLIDATLYVTFEPCVMCAGAMIHSRIGRVVFGVRNAKTGAAGSLMDVLHYPGMNHRVEITEGILADECAALLCYFFRMPRQVFNAQKKAQSSTDLTFKEDIQKAQVSGQGDSLHEHIANLAGSPAIKKGILQTVKVVDELVKVMGRHKPENIVIEMARENQTTQKGQKNSRERMKRIEEGIKELGSQILKEHPVENTQLQNEKLYLYYLQNGRDMYVDQELDINRLSDYDVDHIVPQSFLKDDSIDNKVLTRSDKNRGKSDNVPSEEVVKKMKNYWRQLLNAKLITQRKFDNLTKAERGGLSELDKAGFIKRQLVETRQITKHVAQILDSRMNTKYDENDKLIREVKVITLKSKLVSDFRKDFQFYKVREINNYHHAHDAYLNAVVGTALIKKYPKLESEFVYGDYKVYDVRKMIAKSEQEIGKATAKYFFYSNIMNFFKTEITLANGEIRKRPLIETNGETGEIVWDKGRDFATVRKVLSMPQVNIVKKTEVQTGGFSKESILPKRNSDKLIARKKDWDPKKYGGFDSPTVAYSVLVVAKVEKGKSKKLKSVKELLGITIMERSSFEKNPIDFLEAKGYKEVKKDLIIKLPKYSLFELENGRKRMLASAGELQKGNELALPSKYVNFLYLASHYEKLKGSPEDNEQKQLFVEQHKHYLDEIIEQISEFSKRVILADANLDKVLSAYNKHRDKPIREQAENIIHLFTLTNLGAPAAFKYFDTTIDRKRYTSTKEVLDATLIHQSITGLYETRIDLSQLGGD

SEQ ID NO: 311 - protein, 1554 aa, Artificial Sequence
  Description of artificial sequence: 120 Cas9 TadACP136ins 1248 polypeptide sequence
MDKKYSIGLAIGTNSVGWAVITDEYKVPSKKFKVLGNTDRHSIKKNLIGALLFDSGETAEATRLKRTARRRYTRRKNRICYLQEIFSNEMAKVDDSFFHRLEESFLVEEDKKHERHPIFGNIVDEVAYHEKYPTIYHLRKKLVDSTDKADLRLIYLALAHMIKFRGHFLIEGDLNPDNSDVDKLFIQLVQTYNQLFEENPINASGVDAKAILSARLSKSRRLENLIAQLPGEKKNGLFGNLIALSLGLTPNFKSNFDLAEDAKLQLSKDTYDDDLDNLLAQIGDQYADLFLAAKNLSDAILLSDILRVNTEITKAPLSASMIKRYDEHHQDLTLLKALVRQQLPEKYKEIFFDQSKNGYAGYIDGGASQEEFYKFIKPILEKMDGTEELLVKLNREDLLRKQRTFDNGSIPHQIHLGELHAILRRQEDFYPFLKDNREKIEKILTFRIPYYVGPLARGNSRFAWMTRKSEETITPWNFEEVVDKGASAQSFIERMTNFDKNLPNEKVLPKHSLLYEYFTVYNELTKVKYVTEGMRKPAFLSGEQKKAIVDLLFKTNRKVTVKQLKEDYFKKIECFDSVEISGVEDRFNASLGTYHDLLKIIKDKDFLDNEENEDILEDIVLTLTLFEDREMIEERLKTYAHLFDDKVMKQLKRRRYTGWGRLSRKLINGIRDKQSGKTILDFLKSDGFANRNFMQLIHDDSLTFKEDIQKAQVSGQGDSLHEHIANLAGSPAIKKGILQTVKVVDELVKVMGRHKPENIVIEMARENQTTQKGQKNSRERMKRIEEGIKELGSQILKEHPVENTQLQNEKLYLYYLQNGRDMYVDQELDINRLSDYDVDHIVPQSFLKDDSIDNKVLTRSDKNRGKSDNVPSEEVVKKMKNYWRQLLNAKLITQRKFDNLTKAERGGLSELDKAGFIKRQLVETRQITKHVAQILDSRMNTKYDENDKLIREVKVITLKSKLVSDFRKDFQFYKVREINNYHHAHDAYLNAVVGTALIKKYPKLESEFVYGDYKVYDVRKMIAKSEQEIGKATAKYFFYSNIMNFFKTEITLANGEIRKRPLIETNGETGEIVWDKGRDFATVRKVLSMPQVNIVKKTEVQTGGFSKESILPKRNSDKLIARKKDWDPKKYGGFDSPTVAYSVLVVAKVEKGKSKKLKSVKELLGITIMERSSFEKNPIDFLEAKGYKEVKKDLIIKLPKYSLFELENGRKRMLASAGELQKGNELALPSKYVNFLYLASHYEKLKGSMNHRVEITEGILADECAALLCYFFRMPRQVFNAQKKAQSSTDGSSGSETPGTSESATPESSGSEVEFSHEYWMRHALTLAKRARDEREVPVGAVLVLNNRVIGEGWNRAIGLHDPTAHAEIMALRQGGLVMQNYRLIDATLYVTFEPCVMCAGAMIHSRIGRVVFGVRNAKTGAAGSLMDVLHYPGPEDNEQKQLFVEQHKHYLDEIIEQISEFSKRVILADANLDKVLSAYNKHRDKPIREQAENIIHLFTLTNLGAPAAFKYFDTTIDRKRYTSTKEVLDATLIHQSITGLYETRIDLSQLGGD

SEQ ID NO: 312 - protein, 1554 aa, Artificial Sequence
  Description of artificial sequence: 121 Cas9 TadACP136ins 1052 polypeptide sequence
MDKKYSIGLAIGTNSVGWAVITDEYKVPSKKFKVLGNTDRHSIKKNLIGALLFDSGETAEATRLKRTARRRYTRRKNRICYLQEIFSNEMAKVDDSFFHRLEESFLVEEDKKHERHPIFGNIVDEVAYHEKYPTIYHLRKKLVDSTDKADLRLIYLALAHMIKFRGHFLIEGDLNPDNSDVDKLFIQLVQTYNQLFEENPINASGVDAKAILSARLSKSRRLENLIAQLPGEKKNGLFGNLIALSLGLTPNFKSNFDLAEDAKLQLSKDTYDDDLDNLLAQIGDQYADLFLAAKNLSDAILLSDILRVNTEITKAPLSASMIKRYDEHHQDLTLLKALVRQQLPEKYKEIFFDQSKNGYAGYIDGGASQEEFYKFIKPILEKMDGTEELLVKLNREDLLRKQRTFDNGSIPHQIHLGELHAILRRQEDFYPFLKDNREKIEKILTFRIPYYVGPLARGNSRFAWMTRKSEETITPWNFEEVVDKGASAQSFIERMTNFDKNLPNEKVLPKHSLLYEYFTVYNELTKVKYVTEGMRKPAFLSGEQKKAIVDLLFKTNRKVTVKQLKEDYFKKIECFDSVEISGVEDRFNASLGTYHDLLKIIKDKDFLDNEENEDILEDIVLTLTLFEDREMIEERLKTYAHLFDDKVMKQLKRRRYTGWGRLSRKLINGIRDKQSGKTILDFLKSDGFANRNFMQLIHDDSLTFKEDIQKAQVSGQGDSLHEHIANLAGSPAIKKGILQTVKVVDELVKVMGRHKPENIVIEMARENQTTQKGQKNSRERMKRIEEGIKELGSQILKEHPVENTQLQNEKLYLYYLQNGRDMYVDQELDINRLSDYDVDHIVPQSFLKDDSIDNKVLTRSDKNRGKSDNVPSEEVVKKMKNYWRQLLNAKLITQRKFDNLTKAERGGLSELDKAGFIKRQLVETRQITKHVAQILDSRMNTKYDENDKLIREVKVITLKSKLVSDFRKDFQFYKVREINNYHHAHDAYLNAVVGTALIKKYPKLESEFVYGDYKVYDVRKMIAKSEQEIGKATAKYFFYSNIMNFFKTEITLAMNHRVEITEGILADECAALLCYFFRMPRQVFNAQKKAQSSTDGSSGSETPGTSESATPESSGSEVEFSHEYWMRHALTLAKRARDEREVPVGAVLVLNNRVIGEGWNRAIGLHDPTAHAEIMALRQGGLVMQNYRLIDATLYVTFEPCVMCAGAMIHSRIGRVVFGVRNAKTGAAGSLMDVLHYPGNGEIRKRPLIETNGETGEIVWDKGRDFATVRKVLSMPQVNIVKKTEVQTGGFSKESILPKRNSDKLIARKKDWDPKKYGGFDSPTVAYSVLVVAKVEKGKSKKLKSVKELLGITIMERSSFEKNPIDFLEAKGYKEVKKDLIIKLPKYSLFELENGRKRMLASAGELQKGNELALPSKYVNFLYLASHYEKLKGSPEDNEQKQLFVEQHKHYLDEIIEQISEFSKRVILADANLDKVLSAYNKHRDKPIREQAENIIHLFTLTNLGAPAAFKYFDTTIDRKRYTSTKEVLDATLIHQSITGLYETRIDLSQLGGD

SEQ ID NO: 313 - protein, 1554 aa, Artificial Sequence
  Description of artificial sequence: 122 Cas9 TadACP136ins 1041 polypeptide sequence
MDKKYSIGLAIGTNSVGWAVITDEYKVPSKKFKVLGNTDRHSIKKNLIGALLFDSGETAEATRLKRTARRRYTRRKNRICYLQEIFSNEMAKVDDSFFHRLEESFLVEEDKKHERHPIFGNIVDEVAYHEKYPTIYHLRKKLVDSTDKADLRLIYLALAHMIKFRGHFLIEGDLNPDNSDVDKLFIQLVQTYNQLFEENPINASGVDAKAILSARLSKSRRLENLIAQLPGEKKNGLFGNLIALSLGLTPNFKSNFDLAEDAKLQLSKDTYDDDLDNLLAQIGDQYADLFLAAKNLSDAILLSDILRVNTEITKAPLSASMIKRYDEHHQDLTLLKALVRQQLPEKYKEIFFDQSKNGYAGYIDGGASQEEFYKFIKPILEKMDGTEELLVKLNREDLLRKQRTFDNGSIPHQIHLGELHAILRRQEDFYPFLKDNREKIEKILTFRIPYYVGPLARGNSRFAWMTRKSEETITPWNFEEVVDKGASAQSFIERMTNFDKNLPNEKVLPKHSLLYEYFTVYNELTKVKYVTEGMRKPAFLSGEQKKAIVDLLFKTNRKVTVKQLKEDYFKKIECFDSVEISGVEDRFNASLGTYHDLLKIIKDKDFLDNEENEDILEDIVLTLTLFEDREMIEERLKTYAHLFDDKVMKQLKRRRYTGWGRLSRKLINGIRDKQSGKTILDFLKSDGFANRNFMQLIHDDSLTFKEDIQKAQVSGQGDSLHEHIANLAGSPAIKKGILQTVKVVDELVKVMGRHKPENIVIEMARENQTTQKGQKNSRERMKRIEEGIKELGSQILKEHPVENTQLQNEKLYLYYLQNGRDMYVDQELDINRLSDYDVDHIVPQSFLKDDSIDNKVLTRSDKNRGKSDNVPSEEVVKKMKNYWRQLLNAKLITQRKFDNLTKAERGGLSELDKAGFIKRQLVETRQITKHVAQILDSRMNTKYDENDKLIREVKVITLKSKLVSDFRKDFQFYKVREINNYHHAHDAYLNAVVGTALIKKYPKLESEFVYGDYKVYDVRKMIAKSEQEIGKATAKYFFYSMNHRVEITEGILADECAALLCYFFRMPRQVFNAQKKAQSSTDGSSGSETPGTSESATPESSGSEVEFSHEYWMRHALTLAKRARDEREVPVGAVLVLNNRVIGEGWNRAIGLHDPTAHAEIMALRQGGLVMQNYRLIDATLYVTFEPCVMCAGAMIHSRIGRVVFGVRNAKTGAAGSLMDVLHYPGNIMNFFKTEITLANGEIRKRPLIETNGETGEIVWDKGRDFATVRKVLSMPQVNIVKKTEVQTGGFSKESILPKRNSDKLIARKKDWDPKKYGGFDSPTVAYSVLVVAKVEKGKSKKLKSVKELLGITIMERSSFEKNPIDFLEAKGYKEVKKDLIIKLPKYSLFELENGRKRMLASAGELQKGNELALPSKYVNFLYLASHYEKLKGSPEDNEQKQLFVEQHKHYLDEIIEQISEFSKRVILADANLDKVLSAYNKHRDKPIREQAENIIHLFTLTNLGAPAAFKYFDTTIDRKRYTSTKEVLDATLIHQSITGLYETRIDLSQLGGD

SEQ ID NO: 314 - protein, 1554 aa, Artificial Sequence
  Description of artificial sequence: 123 Cas9 TadACP139ins 1299 polypeptide sequence
MDKKYSIGLAIGTNSVGWAVITDEYKVPSKKFKVLGNTDRHSIKKNLIGALLFDSGETAEATRLKRTARRRYTRRKNRICYLQEIFSNEMAKVDDSFFHRLEESFLVEEDKKHERHPIFGNIVDEVAYHEKYPTIYHLRKKLVDSTDKADLRLIYLALAHMIKFRGHFLIEGDLNPDNSDVDKLFIQLVQTYNQLFEENPINASGVDAKAILSARLSKSRRLENLIAQLPGEKKNGLFGNLIALSLGLTPNFKSNFDLAEDAKLQLSKDTYDDDLDNLLAQIGDQYADLFLAAKNLSDAILLSDILRVNTEITKAPLSASMIKRYDEHHQDLTLLKALVRQQLPEKYKEIFFDQSKNGYAGYIDGGASQEEFYKFIKPILEKMDGTEELLVKLNREDLLRKQRTFDNGSIPHQIHLGELHAILRRQEDFYPFLKDNREKIEKILTFRIPYYVGPLARGNSRFAWMTRKSEETITPWNFEEVVDKGASAQSFIERMTNFDKNLPNEKVLPKHSLLYEYFTVYNELTKVKYVTEGMRKPAFLSGEQKKAIVDLLFKTNRKVTVKQLKEDYFKKIECFDSVEISGVEDRFNASLGTYHDLLKIIKDKDFLDNEENEDILEDIVLTLTLFEDREMIEERLKTYAHLFDDKVMKQLKRRRYTGWGRLSRKLINGIRDKQSGKTILDFLKSDGFANRNFMQLIHDDSLTFKEDIQKAQVSGQGDSLHEHIANLAGSPAIKKGILQTVKVVDELVKVMGRHKPENIVIEMARENQTTQKGQKNSRERMKRIEEGIKELGSQILKEHPVENTQLQNEKLYLYYLQNGRDMYVDQELDINRLSDYDVDHIVPQSFLKDDSIDNKVLTRSDKNRGKSDNVPSEEVVKKMKNYWRQLLNAKLITQRKFDNLTKAERGGLSELDKAGFIKRQLVETRQITKHVAQILDSRMNTKYDENDKLIREVKVITLKSKLVSDFRKDFQFYKVREINNYHHAHDAYLNAVVGTALIKKYPKLESEFVYGDYKVYDVRKMIAKSEQEIGKATAKYFFYSNIMNFFKTEITLANGEIRKRPLIETNGETGEIVWDKGRDFATVRKVLSMPQVNIVKKTEVQTGGFSKESILPKRNSDKLIARKKDWDPKKYGGFDSPTVAYSVLVVAKVEKGKSKKLKSVKELLGITIMERSSFEKNPIDFLEAKGYKEVKKDLIIKLPKYSLFELENGRKRMLASAGELQKGNELALPSKYVNFLYLASHYEKLKGSPEDNEQKQLFVEQHKHYLDEIIEQISEFSKRVILADANLDKVLSAYNKHRMNHRVEITEGILADECAALLCYFFRMPRQVFNAQKKAQSSTDGSSGSETPGTSESATPESSGSEVEFSHEYWMRHALTLAKRARDEREVPVGAVLVLNNRVIGEGWNRAIGLHDPTAHAEIMALRQGGLVMQNYRLIDATLYVTFEPCVMCAGAMIHSRIGRVVFGVRNAKTGAAGSLMDVLHYPGDKPIREQAENIIHLFTLTNLGAPAAFKYFDTTIDRKRYTSTKEVLDATLIHQSITGLYETRIDLSQLGGD

SEQ ID NO: 315 - protein, 1454 aa, Artificial Sequence
  Description of artificial sequence: 124 Cas9 delta 792-872 TadAins polypeptide sequence
MDKKYSIGLAIGTNSVGWAVITDEYKVPSKKFKVLGNTDRHSIKKNLIGALLFDSGETAEATRLKRTARRRYTRRKNRICYLQEIFSNEMAKVDDSFFHRLEESFLVEEDKKHERHPIFGNIVDEVAYHEKYPTIYHLRKKLVDSTDKADLRLIYLALAHMIKFRGHFLIEGDLNPDNSDVDKLFIQLVQTYNQLFEENPINASGVDAKAILSARLSKSRRLENLIAQLPGEKKNGLFGNLIALSLGLTPNFKSNFDLAEDAKLQLSKDTYDDDLDNLLAQIGDQYADLFLAAKNLSDAILLSDILRVNTEITKAPLSASMIKRYDEHHQDLTLLKALVRQQLPEKYKEIFFDQSKNGYAGYIDGGASQEEFYKFIKPILEKMDGTEELLVKLNREDLLRKQRTFDNGSIPHQIHLGELHAILRRQEDFYPFLKDNREKIEKILTFRIPYYVGPLARGNSRFAWMTRKSEETITPWNFEEVVDKGASAQSFIERMTNFDKNLPNEKVLPKHSLLYEYFTVYNELTKVKYVTEGMRKPAFLSGEQKKAIVDLLFKTNRKVTVKQLKEDYFKKIECFDSVEISGVEDRFNASLGTYHDLLKIIKDKDFLDNEENEDILEDIVLTLTLFEDREMIEERLKTYAHLFDDKVMKQLKRRRYTGWGRLSRKLINGIRDKQSGKTILDFLKSDGFANRNFMQLIHDDSLTFKEDIQKAQVSGQGDSLHEHIANLAGSPAIKKGILQTVKVVDELVKVMGRHKPENIVIEMARENQTTQKGQKNSRERMKRIEEGIKELGSEVEFSHEYWMRHALTLAKRARDEREVPVGAVLVLNNRVIGEGWNRAIGLHDPTAHAEIMALRQGGLVMQNYRLIDATLYVTFEPCVMCAGAMIHSRIGRVVFGVRNAKTGAAGSLMDVLHYPGMNHRVEITEGILADECAALLCYFFRMPRQVFNAQKKAQSSTDEEVVKKMKNYWRQLLNAKLITQRKFDNLTKAERGGLSELDKAGFIKRQLVETRQITKHVAQILDSRMNTKYDENDKLIREVKVITLKSKLVSDFRKDFQFYKVREINNYHHAHDAYLNAVVGTALIKKYPKLESEFVYGDYKVYDVRKMIAKSEQEIGKATAKYFFYSNIMNFFKTEITLANGEIRKRPLIETNGETGEIVWDKGRDFATVRKVLSMPQVNIVKKTEVQTGGFSKESILPKRNSDKLIARKKDWDPKKYGGFDSPTVAYSVLVVAKVEKGKSKKLKSVKELLGITIMERSSFEKNPIDFLEAKGYKEVKKDLIIKLPKYSLFELENGRKRMLASAGELQKGNELALPSKYVNFLYLASHYEKLKGSPEDNEQKQLFVEQHKHYLDEIIEQISEFSKRVILADANLDKVLSAYNKHRDKPIREQAENIIHLFTLTNLGAPAAFKYFDTTIDRKRYTSTKEVLDATLIHQSITGLYETRIDLSQLGGD

SEQ ID NO: 316 - protein, 1420 aa, Artificial Sequence
  Description of artificial sequence: 125 Cas9 delta 792-906 TadAins polypeptide sequence
MDKKYSIGLAIGTNSVGWAVITDEYKVPSKKFKVLGNTDRHSIKKNLIGALLFDSGETAEATRLKRTARRRYTRRKNRICYLQEIFSNEMAKVDDSFFHRLEESFLVEEDKKHERHPIFGNIVDEVAYHEKYPTIYHLRKKLVDSTDKADLRLIYLALAHMIKFRGHFLIEGDLNPDNSDVDKLFIQLVQTYNQLFEENPINASGVDAKAILSARLSKSRRLENLIAQLPGEKKNGLFGNLIALSLGLTPNFKSNFDLAEDAKLQLSKDTYDDDLDNLLAQIGDQYADLFLAAKNLSDAILLSDILRVNTEITKAPLSASMIKRYDEHHQDLTLLKALVRQQLPEKYKEIFFDQSKNGYAGYIDGGASQEEFYKFIKPILEKMDGTEELLVKLNREDLLRKQRTFDNGSIPHQIHLGELHAILRRQEDFYPFLKDNREKIEKILTFRIPYYVGPLARGNSRFAWMTRKSEETITPWNFEEVVDKGASAQSFIERMTNFDKNLPNEKVLPKHSLLYEYFTVYNELTKVKYVTEGMRKPAFLSGEQKKAIVDLLFKTNRKVTVKQLKEDYFKKIECFDSVEISGVEDRFNASLGTYHDLLKIIKDKDFLDNEENEDILEDIVLTLTLFEDREMIEERLKTYAHLFDDKVMKQLKRRRYTGWGRLSRKLINGIRDKQSGKTILDFLKSDGFANRNFMQLIHDDSLTFKEDIQKAQVSGQGDSLHEHIANLAGSPAIKKGILQTVKVVDELVKVMGRHKPENIVIEMARENQTTQKGQKNSRERMKRIEEGIKELGSEVEFSHEYWMRHALTLAKRARDEREVPVGAVLVLNNRVIGEGWNRAIGLHDPTAHAEIMALRQGGLVMQNYRLIDATLYVTFEPCVMCAGAMIHSRIGRVVFGVRNAKTGAAGSLMDVLHYPGMNHRVEITEGILADECAALLCYFFRMPRQVFNAQKKAQSSTDGLSELDKAGFIKRQLVETRQITKHVAQILDSRMNTKYDENDKLIREVKVITLKSKLVSDFRKDFQFYKVREINNYHHAHDAYLNAVVGTALIKKYPKLESEFVYGDYKVYDVRKMIAKSEQEIGKATAKYFFYSNIMNFFKTEITLANGEIRKRPLIETNGETGEIVWDKGRDFATVRKVLSMPQVNIVKKTEVQTGGFSKESILPKRNSDKLIARKKDWDPKKYGGFDSPTVAYSVLVVAKVEKGKSKKLKSVKELLGITIMERSSFEKNPIDFLEAKGYKEVKKDLIIKLPKYSLFELENGRKRMLASAGELQKGNELALPSKYVNFLYLASHYEKLKGSPEDNEQKQLFVEQHKHYLDEIIEQISEFSKRVILADANLDKVLSAYNKHRDKPIREQAENIIHLFTLTNLGAPAAFKYFDTTIDRKRYTSTKEVLDATLIHQSITGLYETRIDLSQLGGD

SEQ ID NO: 317 - protein, 1554 aa, Artificial Sequence
  Description of artificial sequence: 126 TadA CP65ins 1003 polypeptide sequence
MDKKYSIGLAIGTNSVGWAVITDEYKVPSKKFKVLGNTDRHSIKKNLIGALLFDSGETAEATRLKRTARRRYTRRKNRICYLQEIFSNEMAKVDDSFFHRLEESFLVEEDKKHERHPIFGNIVDEVAYHEKYPTIYHLRKKLVDSTDKADLRLIYLALAHMIKFRGHFLIEGDLNPDNSDVDKLFIQLVQTYNQLFEENPINASGVDAKAILSARLSKSRRLENLIAQLPGEKKNGLFGNLIALSLGLTPNFKSNFDLAEDAKLQLSKDTYDDDLDNLLAQIGDQYADLFLAAKNLSDAILLSDILRVNTEITKAPLSASMIKRYDEHHQDLTLLKALVRQQLPEKYKEIFFDQSKNGYAGYIDGGASQEEFYKFIKPILEKMDGTEELLVKLNREDLLRKQRTFDNGSIPHQIHLGELHAILRRQEDFYPFLKDNREKIEKILTFRIPYYVGPLARGNSRFAWMTRKSEETITPWNFEEVVDKGASAQSFIERMTNFDKNLPNEKVLPKHSLLYEYFTVYNELTKVKYVTEGMRKPAFLSGEQKKAIVDLLFKTNRKVTVKQLKEDYFKKIECFDSVEISGVEDRFNASLGTYHDLLKIIKDKDFLDNEENEDILEDIVLTLTLFEDREMIEERLKTYAHLFDDKVMKQLKRRRYTGWGRLSRKLINGIRDKQSGKTILDFLKSDGFANRNFMQLIHDDSLTFKEDIQKAQVSGQGDSLHEHIANLAGSPAIKKGILQTVKVVDELVKVMGRHKPENIVIEMARENQTTQKGQKNSRERMKRIEEGIKELGSQILKEHPVENTQLQNEKLYLYYLQNGRDMYVDQELDINRLSDYDVDHIVPQSFLKDDSIDNKVLTRSDKNRGKSDNVPSEEVVKKMKNYWRQLLNAKLITQRKFDNLTKAERGGLSELDKAGFIKRQLVETRQITKHVAQILDSRMNTKYDENDKLIREVKVITLKSKLVSDFRKDFQFYKVREINNYHHAHDAYLNAVVGTALIKKYPKTAHAEIMALRQGGLVMQNYRLIDATLYVTFEPCVMCAGAMIHSRIGRVVFGVRNAKTGAAGSLMDVLHYPGMNHRVEITEGILADECAALLCYFFRMPRQVFNAQKKAQSSTDGSSGSETPGTSESATPESSGSEVEFSHEYWMRHALTLAKRARDEREVPVGAVLVLNNRVIGEGWNRAIGLHDPLESEFVYGDYKVYDVRKMIAKSEQEIGKATAKYFFYSNIMNFFKTEITLANGEIRKRPLIETNGETGEIVWDKGRDFATVRKVLSMPQVNIVKKTEVQTGGFSKESILPKRNSDKLIARKKDWDPKKYGGFDSPTVAYSVLVVAKVEKGKSKKLKSVKELLGITIMERSSFEKNPIDFLEAKGYKEVKKDLIIKLPKYSLFELENGRKRMLASAGELQKGNELALPSKYVNFLYLASHYEKLKGSPEDNEQKQLFVEQHKHYLDEIIEQISEFSKRVILADANLDKVLSAYNKHRDKPIREQAENIIHLFTLTNLGAPAAFKYFDTTIDRKRYTSTKEVLDATLIHQSITGLYETRIDLSQLGGD

SEQ ID NO: 318 - protein, 1554 aa, Artificial Sequence
  Description of artificial sequence: 127 TadA CP65ins 1016 polypeptide sequence
MDKKYSIGLAIGTNSVGWAVITDEYKVPSKKFKVLGNTDRHSIKKNLIGALLFDSGETAEATRLKRTARRRYTRRKNRICYLQEIFSNEMAKVDDSFFHRLEESFLVEEDKKHERHPIFGNIVDEVAYHEKYPTIYHLRKKLVDSTDKADLRLIYLALAHMIKFRGHFLIEGDLNPDNSDVDKLFIQLVQTYNQLFEENPINASGVDAKAILSARLSKSRRLENLIAQLPGEKKNGLFGNLIALSLGLTPNFKSNFDLAEDAKLQLSKDTYDDDLDNLLAQIGDQYADLFLAAKNLSDAILLSDILRVNTEITKAPLSASMIKRYDEHHQDLTLLKALVRQQLPEKYKEIFFDQSKNGYAGYIDGGASQEEFYKFIKPILEKMDGTEELLVKLNREDLLRKQRTFDNGSIPHQIHLGELHAILRRQEDFYPFLKDNREKIEKILTFRIPYYVGPLARGNSRFAWMTRKSEETITPWNFEEVVDKGASAQSFIERMTNFDKNLPNEKVLPKHSLLYEYFTVYNELTKVKYVTEGMRKPAFLSGEQKKAIVDLLFKTNRKVTVKQLKEDYFKKIECFDSVEISGVEDRFNASLGTYHDLLKIIKDKDFLDNEENEDILEDIVLTLTLFEDREMIEERLKTYAHLFDDKVMKQLKRRRYTGWGRLSRKLINGIRDKQSGKTILDFLKSDGFANRNFMQLIHDDSLTFKEDIQKAQVSGQGDSLHEHIANLAGSPAIKKGILQTVKVVDELVKVMGRHKPENIVIEMARENQTTQKGQKNSRERMKRIEEGIKELGSQILKEHPVENTQLQNEKLYLYYLQNGRDMYVDQELDINRLSDYDVDHIVPQSFLKDDSIDNKVLTRSDKNRGKSDNVPSEEVVKKMKNYWRQLLNAKLITQRKFDNLTKAERGGLSELDKAGFIKRQLVETRQITKHVAQILDSRMNTKYDENDKLIREVKVITLKSKLVSDFRKDFQFYKVREINNYHHAHDAYLNAVVGTALIKKYPKLESEFVYGDYKVTAHAEIMALRQGGLVMQNYRLIDATLYVTFEPCVMCAGAMIHSRIGRVVFGVRNAKTGAAGSLMDVLHYPGMNHRVEITEGILADECAALLCYFFRMPRQVFNAQKKAQSSTDGSSGSETPGTSESATPESSGSEVEFSHEYWMRHALTLAKRARDEREVPVGAVLVLNNRVIGEGWNRAIGLHDPYDVRKMIAKSEQEIGKATAKYFFYSNIMNFFKTEITLANGEIRKRPLIETNGETGEIVWDKGRDFATVRKVLSMPQVNIVKKTEVQTGGFSKESILPKRNSDKLIARKKDWDPKKYGGFDSPTVAYSVLVVAKVEKGKSKKLKSVKELLGITIMERSSFEKNPIDFLEAKGYKEVKKDLIIKLPKYSLFELENGRKRMLASAGELQKGNELALPSKYVNFLYLASHYEKLKGSPEDNEQKQLFVEQHKHYLDEIIEQISEFSKRVILADANLDKVLSAYNKHRDKPIREQAENIIHLFTLTNLGAPAAFKYFDTTIDRKRYTSTKEVLDATLIHQSITGLYETRIDLSQLGGD

SEQ ID NO: 319 - protein, 1554 aa, Artificial Sequence
  Description of artificial sequence: 128 TadA CP65ins 1022 polypeptide sequence
MDKKYSIGLAIGTNSVGWAVITDEYKVPSKKFKVLGNTDRHSIKKNLIGALLFDSGETAEATRLKRTARRRYTRRKNRICYLQEIFSNEMAKVDDSFFHRLEESFLVEEDKKHERHPIFGNIVDEVAYHEKYPTIYHLRKKLVDSTDKADLRLIYLALAHMIKFRGHFLIEGDLNPDNSDVDKLFIQLVQTYNQLFEENPINASGVDAKAILSARLSKSRRLENLIAQLPGEKKNGLFGNLIALSLGLTPNFKSNFDLAEDAKLQLSKDTYDDDLDNLLAQIGDQYADLFLAAKNLSDAILLSDILRVNTEITKAPLSASMIKRYDEHHQDLTLLKALVRQQLPEKYKEIFFDQSKNGYAGYIDGGASQEEFYKFIKPILEKMDGTEELLVKLNREDLLRKQRTFDNGSIPHQIHLGELHAILRRQEDFYPFLKDNREKIEKILTFRIPYYVGPLARGNSRFAWMTRKSEETITPWNFEEVVDKGASAQSFIERMTNFDKNLPNEKVLPKHSLLYEYFTVYNELTKVKYVTEGMRKPAFLSGEQKKAIVDLLFKTNRKVTVKQLKEDYFKKIECFDSVEISGVEDRFNASLGTYHDLLKIIKDKDFLDNEENEDILEDIVLTLTLFEDREMIEERLKTYAHLFDDKVMKQLKRRRYTGWGRLSRKLINGIRDKQSGKTILDFLKSDGFANRNFMQLIHDDSLTFKEDIQKAQVSGQGDSLHEHIANLAGSPAIKKGILQTVKVVDELVKVMGRHKPENIVIEMARENQTTQKGQKNSRERMKRIEEGIKELGSQILKEHPVENTQLQNEKLYLYYLQNGRDMYVDQELDINRLSDYDVDHIVPQSFLKDDSIDNKVLTRSDKNRGKSDNVPSEEVVKKMKNYWRQLLNAKLITQRKFDNLTKAERGGLSELDKAGFIKRQLVETRQITKHVAQILDSRMNTKYDENDKLIREVKVITLKSKLVSDFRKDFQFYKVREINNYHHAHDAYLNAVVGTALIKKYPKLESEFVYGDYKVYDVRKMITAHAEIMALRQGGLVMQNYRLIDATLYVTFEPCVMCAGAMIHSRIGRVVFGVRNAKTGAAGSLMDVLHYPGMNHRVEITEGILADECAALLCYFFRMPRQVFNAQKKAQSSTDGSSGSETPGTSESATPESSGSEVEFSHEYWMRHALTLAKRARDEREVPVGAVLVLNNRVIGEGWNRAIGLHDPAKSEQEIGKATAKYFFYSNIMNFFKTEITLANGEIRKRPLIETNGETGEIVWDKGRDFATVRKVLSMPQVNIVKKTEVQTGGFSKESILPKRNSDKLIARKKDWDPKKYGGFDSPTVAYSVLVVAKVEKGKSKKLKSVKELLGITIMERSSFEKNPIDFLEAKGYKEVKKDLIIKLPKYSLFELENGRKRMLASAGELQKGNELALPSKYVNFLYLASHYEKLKGSPEDNEQKQLFVEQHKHYLDEIIEQISEFSKRVILADANLDKVLSAYNKHRDKPIREQAENIIHLFTLTNLGAPAAFKYFDTTIDRKRYTSTKEVLDATLIHQSITGLYETRIDLSQLGGD

SEQ ID NO: 320 - protein, 1554 aa, Artificial Sequence
  Description of artificial sequence: 129 TadA CP65ins 1029 polypeptide sequence
MDKKYSIGLAIGTNSVGWAVITDEYKVPSKKFKVLGNTDRHSIKKNLIGALLFDSGETAEATRLKRTARRRYTRRKNRICYLQEIFSNEMAKVDDSFFHRLEESFLVEEDKKHERHPIFGNIVDEVAYHEKYPTIYHLRKKLVDSTDKADLRLIYLALAHMIKFRGHFLIEGDLNPDNSDVDKLFIQLVQTYNQLFEENPINASGVDAKAILSARLSKSRRLENLIAQLPGEKKNGLFGNLIALSLGLTPNFKSNFDLAEDAKLQLSKDTYDDDLDNLLAQIGDQYADLFLAAKNLSDAILLSDILRVNTEITKAPLSASMIKRYDEHHQDLTLLKALVRQQLPEKYKEIFFDQSKNGYAGYIDGGASQEEFYKFIKPILEKMDGTEELLVKLNREDLLRKQRTFDNGSIPHQIHLGELHAILRRQEDFYPFLKDNREKIEKILTFRIPYYVGPLARGNSRFAWMTRKSEETITPWNFEEVVDKGASAQSFIERMTNFDKNLPNEKVLPKHSLLYEYFTVYNELTKVKYVTEGMRKPAFLSGEQKKAIVDLLFKTNRKVTVKQLKEDYFKKIECFDSVEISGVEDRFNASLGTYHDLLKIIKDKDFLDNEENEDILEDIVLTLTLFEDREMIEERLKTYAHLFDDKVMKQLKRRRYTGWGRLSRKLINGIRDKQSGKTILDFLKSDGFANRNFMQLIHDDSLTFKEDIQKAQVSGQGDSLHEHIANLAGSPAIKKGILQTVKVVDELVKVMGRHKPENIVIEMARENQTTQKGQKNSRERMKRIEEGIKELGSQILKEHPVENTQLQNEKLYLYYLQNGRDMYVDQELDINRLSDYDVDHIVPQSFLKDDSIDNKVLTRSDKNRGKSDNVPSEEVVKKMKNYWRQLLNAKLITQRKFDNLTKAERGGLSELDKAGFIKRQLVETRQITKHVAQILDSRMNTKYDENDKLIREVKVITLKSKLVSDFRKDFQFYKVREINNYHHAHDAYLNAVVGTALIKKYPKLESEFVYGDYKVYDVRKMIAKSEQEITAHAEIMALRQGGLVMQNYRLIDATLYVTFEPCVMCAGAMIHSRIGRVVFGVRNAKTGAAGSLMDVLHYPGMNHRVEITEGILADECAALLCYFFRMPRQVFNAQKKAQSSTDGSSGSETPGTSESATPESSGSEVEFSHEYWMRHALTLAKRARDEREVPVGAVLVLNNRVIGEGWNRAIGLHDPGKATAKYFFYSNIMNFFKTEITLANGEIRKRPLIETNGETGEIVWDKGRDFATVRKVLSMPQVNIVKKTEVQTGGFSKESILPKRNSDKLIARKKDWDPKKYGGFDSPTVAYSVLVVAKVEKGKSKKLKSVKELLGITIMERSSFEKNPIDFLEAKGYKEVKKDLIIKLPKYSLFELENGRKRMLASAGELQKGNELALPSKYVNFLYLASHYEKLKGSPEDNEQKQLFVEQHKHYLDEIIEQISEFSKRVILADANLDKVLSAYNKHRDKPIREQAENIIHLFTLTNLGAPAAFKYFDTTIDRKRYTSTKEVLDATLIHQSITGLYETRIDLSQLGGD

SEQ ID NO: 321 - protein, 1554 aa, Artificial Sequence
  Description of artificial sequence: 130 TadA CP65ins 1041 polypeptide sequence
MDKKYSIGLAIGTNSVGWAVITDEYKVPSKKFKVLGNTDRHSIKKNLIGALLFDSGETAEATRLKRTARRRYTRRKNRICYLQEIFSNEMAKVDDSFFHRLEESFLVEEDKKHERHPIFGNIVDEVAYHEKYPTIYHLRKKLVDSTDKADLRLIYLALAHMIKFRGHFLIEGDLNPDNSDVDKLFIQLVQTYNQLFEENPINASGVDAKAILSARLSKSRRLENLIAQLPGEKKNGLFGNLIALSLGLTPNFKSNFDLAEDAKLQLSKDTYDDDLDNLLAQIGDQYADLFLAAKNLSDAILLSDILRVNTEITKAPLSASMIKRYDEHHQDLTLLKALVRQQLPEKYKEIFFDQSKNGYAGYIDGGASQEEFYKFIKPILEKMDGTEELLVKLNREDLLRKQRTFDNGSIPHQIHLGELHAILRRQEDFYPFLKDNREKIEKILTFRIPYYVGPLARGNSRFAWMTRKSEETITPWNFEEVVDKGASAQSFIERMTNFDKNLPNEKVLPKHSLLYEYFTVYNELTKVKYVTEGMRKPAFLSGEQKKAIVDLLFKTNRKVTVKQLKEDYFKKIECFDSVEISGVEDRFNASLGTYHDLLKIIKDKDFLDNEENEDILEDIVLTLTLFEDREMIEERLKTYAHLFDDKVMKQLKRRRYTGWGRLSRKLINGIRDKQSGKTILDFLKSDGFANRNFMQLIHDDSLTFKEDIQKAQVSGQGDSLHEHIANLAGSPAIKKGILQTVKVVDELVKVMGRHKPENIVIEMARENQTTQKGQKNSRERMKRIEEGIKELGSQILKEHPVENTQLQNEKLYLYYLQNGRDMYVDQELDINRLSDYDVDHIVPQSFLKDDSIDNKVLTRSDKNRGKSDNVPSEEVVKKMKNYWRQLLNAKLITQRKFDNLTKAERGGLSELDKAGFIKRQLVETRQITKHVAQILDSRMNTKYDENDKLIREVKVITLKSKLVSDFRKDFQFYKVREINNYHHAHDAYLNAVVGTALIKKYPKLESEFVYGDYKVYDVRKMIAKSEQEIGKATAKYFFYSTAHAEIMALRQGGLVMQNYRLIDATLYVTFEPCVMCAGAMIHSRIGRVVFGVRNAKTGAAGSLMDVLHYPGMNHRVEITEGILADECAALLCYFFRMPRQVFNAQKKAQSSTDGSSGSETPGTSESATPESSGSEVEFSHEYWMRHALTLAKRARDEREVPVGAVLVLNNRVIGEGWNRAIGLHDPNIMNFFKTEITLANGEIRKRPLIETNGETGEIVWDKGRDFATVRKVLSMPQVNIVKKTEVQTGGFSKESILPKRNSDKLIARKKDWDPKKYGGFDSPTVAYSVLVVAKVEKGKSKKLKSVKELLGITIMERSSFEKNPIDFLEAKGYKEVKKDLIIKLPKYSLFELENGRKRMLASAGELQKGNELALPSKYVNFLYLASHYEKLKGSPEDNEQKQLFVEQHKHYLDEIIEQISEFSKRVILADANLDKVLSAYNKHRDKPIREQAENIIHLFTLTNLGAPAAFKYFDTTIDRKRYTSTKEVLDATLIHQSITGLYETRIDLSQLGGD

SEQ ID NO: 322 - protein, 1554 aa, Artificial Sequence
  Description of artificial sequence: 131 TadA CP65ins 1054 polypeptide sequence
MDKKYSIGLAIGTNSVGWAVITDEYKVPSKKFKVLGNTDRHSIKKNLIGALLFDSGETAEATRLKRTARRRYTRRKNRICYLQEIFSNEMAKVDDSFFHRLEESFLVEEDKKHERHPIFGNIVDEVAYHEKYPTIYHLRKKLVDSTDKADLRLIYLALAHMIKFRGHFLIEGDLNPDNSDVDKLFIQLVQTYNQLFEENPINASGVDAKAILSARLSKSRRLENLIAQLPGEKKNGLFGNLIALSLGLTPNFKSNFDLAEDAKLQLSKDTYDDDLDNLLAQIGDQYADLFLAAKNLSDAILLSDILRVNTEITKAPLSASMIKRYDEHHQDLTLLKALVRQQLPEKYKEIFFDQSKNGYAGYIDGGASQEEFYKFIKPILEKMDGTEELLVKLNREDLLRKQRTFDNGSIPHQIHLGELHAILRRQEDFYPFLKDNREKIEKILTFRIPYYVGPLARGNSRFAWMTRKSEETITPWNFEEVVDKGASAQSFIERMTNFDKNLPNEKVLPKHSLLYEYFTVYNELTKVKYVTEGMRKPAFLSGEQKKAIVDLLFKTNRKVTVKQLKEDYFKKIECFDSVEISGVEDRFNASLGTYHDLLKIIKDKDFLDNEENEDILEDIVLTLTLFEDREMIEERLKTYAHLFDDKVMKQLKRRRYTGWGRLSRKLINGIRDKQSGKTILDFLKSDGFANRNFMQLIHDDSLTFKEDIQKAQVSGQGDSLHEHIANLAGSPAIKKGILQTVKVVDELVKVMGRHKPENIVIEMARENQTTQKGQKNSRERMKRIEEGIKELGSQILKEHPVENTQLQNEKLYLYYLQNGRDMYVDQELDINRLSDYDVDHIVPQSFLKDDSIDNKVLTRSDKNRGKSDNVPSEEVVKKMKNYWRQLLNAKLITQRKFDNLTKAERGGLSELDKAGFIKRQLVETRQITKHVAQILDSRMNTKYDENDKLIREVKVITLKSKLVSDFRKDFQFYKVREINNYHHAHDAYLNAVVGTALIKKYPKLESEFVYGDYKVYDVRKMIAKSEQEIGKATAKYFFYSNIMNFFKTEITLANTAHAEIMALRQGGLVMQNYRLIDATLYVTFEPCVMCAGAMIHSRIGRVVFGVRNAKTGAAGSLMDVLHYPGMNHRVEITEGILADECAALLCYFFRMPRQVFNAQKKAQSSTDGSSGSETPGTSESATPESSGSEVEFSHEYWMRHALTLAKRARDEREVPVGAVLVLNNRVIGEGWNRAIGLHDPGEIRKRPLIETNGETGEIVWDKGRDFATVRKVLSMPQVNIVKKTEVQTGGFSKESILPKRNSDKLIARKKDWDPKKYGGFDSPTVAYSVLVVAKVEKGKSKKLKSVKELLGITIMERSSFEKNPIDFLEAKGYKEVKKDLIIKLPKYSLFELENGRKRMLASAGELQKGNELALPSKYVNFLYLASHYEKLKGSPEDNEQKQLFVEQHKHYLDEIIEQISEFSKRVILADANLDKVLSAYNKHRDKPIREQAENIIHLFTLTNLGAPAAFKYFDTTIDRKRYTSTKEVLDATLIHQSITGLYETRIDLSQLGGD

SEQ ID NO: 323 - protein, 1554 aa, Artificial Sequence
  Description of artificial sequence: 132 TadA CP65ins 1246 polypeptide sequence
MDKKYSIGLAIGTNSVGWAVITDEYKVPSKKFKVLGNTDRHSIKKNLIGALLFDSGETAEATRLKRTARRRYTRRKNRICYLQEIFSNEMAKVDDSFFHRLEESFLVEEDKKHERHPIFGNIVDEVAYHEKYPTIYHLRKKLVDSTDKADLRLIYLALAHMIKFRGHFLIEGDLNPDNSDVDKLFIQLVQTYNQLFEENPINASGVDAKAILSARLSKSRRLENLIAQLPGEKKNGLFGNLIALSLGLTPNFKSNFDLAEDAKLQLSKDTYDDDLDNLLAQIGDQYADLFLAAKNLSDAILLSDILRVNTEITKAPLSASMIKRYDEHHQDLTLLKALVRQQLPEKYKEIFFDQSKNGYAGYIDGGASQEEFYKFIKPILEKMDGTEELLVKLNREDLLRKQRTFDNGSIPHQIHLGELHAILRRQEDFYPFLKDNREKIEKILTFRIPYYVGPLARGNSRFAWMTRKSEETITPWNFEEVVDKGASAQSFIERMTNFDKNLPNEKVLPKHSLLYEYFTVYNELTKVKYVTEGMRKPAFLSGEQKKAIVDLLFKTNRKVTVKQLKEDYFKKIECFDSVEISGVEDRFNASLGTYHDLLKIIKDKDFLDNEENEDILEDIVLTLTLFEDREMIEERLKTYAHLFDDKVMKQLKRRRYTGWGRLSRKLINGIRDKQSGKTILDFLKSDGFANRNFMQLIHDDSLTFKEDIQKAQVSGQGDSLHEHIANLAGSPAIKKGILQTVKVVDELVKVMGRHKPENIVIEMARENQTTQKGQKNSRERMKRIEEGIKELGSQILKEHPVENTQLQNEKLYLYYLQNGRDMYVDQELDINRLSDYDVDHIVPQSFLKDDSIDNKVLTRSDKNRGKSDNVPSEEVVKKMKNYWRQLLNAKLITQRKFDNLTKAERGGLSELDKAGFIKRQLVETRQITKHVAQILDSRMNTKYDENDKLIREVKVITLKSKLVSDFRKDFQFYKVREINNYHHAHDAYLNAVVGTALIKKYPKLESEFVYGDYKVYDVRKMIAKSEQEIGKATAKYFFYSNIMNFFKTEITLANGEIRKRPLIETNGETGEIVWDKGRDFATVRKVLSMPQVNIVKKTEVQTGGFSKESILPKRNSDKLIARKKDWDPKKYGGFDSPTVAYSVLVVAKVEKGKSKKLKSVKELLGITIMERSSFEKNPIDFLEAKGYKEVKKDLIIKLPKYSLFELENGRKRMLASAGELQKGNELALPSKYVNFLYLASHYEKLKGTAHAEIMALRQGGLVMQNYRLIDATLYVTFEPCVMCAGAMIHSRIGRVVFGVRNAKTGAAGSLMDVLHYPGMNHRVEITEGILADECAALLCYFFRMPRQVFNAQKKAQSSTDGSSGSETPGTSESATPESSGSEVEFSHEYWMRHALTLAKRARDEREVPVGAVLVLNNRVIGEGWNRAIGLHDPSPEDNEQKQLFVEQHKHYLDEIIEQISEFSKRVILADANLDKVLSAYNKHRDKPIREQAENIIHLFTLTNLGAPAAFKYFDTTIDRKRYTSTKEVLDATLIHQSITGLYETRIDLSQLGGD

SEQ ID NO: 324 - protein, 160 aa, Staphylococcus aureus
  MISC_FEATURE (1)..(160): TadA polypeptide sequence
MGSHMTNDIYFMTLAIEEAKKAAQLGEVPIGAIITKDDEVIARAHNLRETLQQPTAHAEHIAIERAAKVLGSWRLEGCTLYVTLEPCVMCAGTIVMSRIPRVVYGADDPKGGCSGSLMNLLQQSNFNHRAIVDKGVLKEACSTLLTTFFKNLRANKKSTN

SEQ ID NO: 325 - protein, 161 aa, Bacillus subtilis
  MISC_FEATURE (1)..(161): TadA polypeptide sequence
MTQDELYMKEAIKEAKKAEEKGEVPIGAVLVINGEIIARAHNLRETEQRSIAHAEMLVIDEACKALGTWRLEGATLYVTLEPCPMCAGAVVLSRVEKVVFGAFDPKGGCSGTLMNLLQEERFNHQAEVVSGVLEEECGGMLSAFFRELRKKKKAARKNLSE

SEQ ID NO: 326 - protein, 183 aa, Salmonella typhimurium
  MISC_FEATURE (1)..(183): TadA polypeptide sequence
MPPAFITGVTSLSDVELDHEYWMRHALTLAKRAWDEREVPVGAVLVHNHRVIGEGWNRPIGRHDPTAHAEIMALRQGGLVLQNYRLLDTTLYVTLEPCVMCAGAMVHSRIGRVVFGARDAKTGAAGSLIDVLHHPGMNHRVEIIEGVLRDECATLLSDFFRMRRQEIKALKKADRAEGAGPAV

SEQ ID NO: 327 - protein, 164 aa, Shewanella putrefaciens
  MISC_FEATURE (1)..(164): TadA polypeptide sequence
MDEYWMQVAMQMAEKAEAAGEVPVGAVLVKDGQQIATGYNLSISQHDPTAHAEILCLRSAGKKLENYRLLDATLYITLEPCAMCAGAMVHSRIARVVYGARDEKTGAAGTVVNLLQHPAFNHQVEVTSGVLAEACSAQLSRFFKRRRDEKKALKLAQRAQQGIE

SEQ ID NO: 328 - protein, 173 aa, Haemophilus influenzae
  MISC_FEATURE (1)..(173): TadA polypeptide sequence
MDAAKVRSEFDEKMMRYALELADKAEALGEIPVGAVLVDDARNIIGEGWNLSIVQSDPTAHAEIIALRNGAKNIQNYRLLNSTLYVTLEPCTMCAGAILHSRIKRLVFGASDYKTGAIGSRFHFFDDYKMNHTLEITSGVLAEECSQKLSTFFQKRREEKKIEKALLKSLSDK

SEQ ID NO: 329 - protein, 161 aa, Caulobacter crescentus
  MISC_FEATURE (1)..(161): TadA polypeptide sequence
MRTDESEDQDHRMMRLALDAARAAAEAGETPVGAVILDPSTGEVIATAGNGPIAAHDPTAHAEIAAMRAAAAKLGNYRLTDLTLVVTLEPCAMCAGAISHARIGRVVFGADDPKGGAVVHGPKFFAQPTCHWRPEVTGGVLADESADLLRGFFRARRKAKI

SEQ ID NO: 330 - protein, 179 aa, Geobacter sulfurreducens
  MISC_FEATURE (1)..(179): TadA polypeptide sequence
MSSLKKTPIRDDAYWMGKAIREAAKAAARDEVPIGAVIVRDGAVIGRGHNLREGSNDPSAHAEMIAIRQAARRSANWRLTGATLYVTLEPCLMCMGAIILARLERVVFGCYDPKGGAAGSLYDLSADPRLNHQVRLSPGVCQEECGTMLSDFFRDLRRRKKAKATPALFIDERKVPPEP

SEQ ID NO: 331 - protein, 167 aa, Artificial Sequence
  Description of artificial sequence: TadA*8 polypeptide sequence
MSEVEFSHEYWMRHALTLAKRARDEREVPVGAVLVLNNRVIGEGWNRAIGLHDPTAHAEIMALRQGGLVMQNYRLIDATLYVTFEPCVMCAGAMIHSRIGRVVFGVRNAKTGAAGSLMDVLHYPGMNHRVEITEGILADECAALLCTFFRMPRQVFNAQKKAQSSTD

SEQ ID NO: 332 - RNA, 80 nt, Artificial Sequence
  Description of artificial sequence: gRNA scaffold polynucleotide sequence
guuuuagagcuagaaauagcaaguuaaaauaaggcuaguccguuaucaacuugaaaaaguggcaccgagucggugcuuuu

SEQ ID NO: 333 - RNA, 125 nt, Artificial Sequence
  Description of artificial sequence: gRNA scaffold polynucleotide sequence
guuuuuguacucucaagauuuaaguaacuguacaacgaaacuuacacaguuacuuaaaucuugcagaagcuacaaagauaaggcuucaugccgaaaucaacacccugucauuuuauggcagggug

SEQ ID NO: 334 - RNA, 76 nt, S. pyogenes
  misc_feature (1)..(76): S. pyogenes gRNA scaffold ologonucleotide sequence
guuuuagagcuagaaauagcaaguuaaaauaaggcuaguccguuaucaacuugaaaaaguggcaccgagucggugc

SEQ ID NO: 335 - RNA, 84 nt, S. aureus
  misc_feature (1)..(84): S. aureus gRNA scaffold oligonucleotide sequence
guuuuaguacucuguaaugaaaauuacagaaucuacuaaaacaaggcaaaaugccguguuuaucucgucaacuuguuggcgaga

SEQ ID NO: 336 - RNA, 97 nt, Bacillus hisashii
  misc_feature (1)..(97): BhCas12b gRNA scaffold oligonucleotide sequence
guucugucuuuuggucaggacaaccgucuagcuauaagugcugcagggugugagaaacuccuauugcuggacgaugucucuuacgaggcauuagcac

SEQ ID NO: 337 - RNA, 88 nt, Bacillus sp.
  misc_feature (1)..(88): BvCas12b gRNA scaffold oligonucleotide sequence
gaccuauagggucaaugaaucugugcgugugccauaaguaauuaaaaauuacccaccacaggagcaccugaaaacaggugcuuggcac

SEQ ID NO: 338 - RNA, 80 nt, Artificial Sequence
  Description of artificial sequence: gRNA scaffold nucleotide sequence; oligonucleotide sequence
  modified_base (78)..(80): um
  misc_feature (78)..(80): In embodiments, a nucleotide(s) is linked to the preceding 5' nucleotide by a 3' phosphorothioate internucleotide liknage
guuuuagagcuagaaauagcaaguuaaaauaaggcuaguccguuaucaacuugaaaaagugggaccgagucggugcuuuu

SEQ ID NO: 339 - RNA, 80 nt, Artificial Sequence; identical to SEQ ID NO: 332
  Description of artificial sequence: gRNA scaffold nucleotide sequence
  misc_feature (78)..(80): In embodiments, a nucleotide(s) is linked to the preceding 5' nucleotide by a 3' phosphorothioate internucleotide liknage
  modified_base (78)..(80): um

SEQ ID NO: 340 - RNA, 117 nt, Bacillus hisashii
  misc_feature (1)..(117): BhCas12b gRNA scaffold + guide sequence; oligonucleotide sequence
  misc_feature (1)..(97): BhCas12b sgRNA scaffold
guucugucuuuuggucaggacaaccgucuagcuauaagugcugcagggugugagaaacuccuauugcuggacgaugucucuuacgaggcauuagcacnnnnnnnnnnnnnnnnnnnn

SEQ ID NO: 341 - RNA, 108 nt, Bacillus sp.
  misc_feature (1)..(108): BvCas12b gRNA scaffold + guide sequence; oligonucleotide sequence
  misc_feature (1)..(88): BvCas12b gRNA scaffold
gaccuauagggucaaugaaucugugcgugugccauaaguaauuaaaaauuacccaccacaggagcaccugaaaacaggugcuuggcacnnnnnnnnnnnnnnnnnnnn

SEQ ID NO: 342 - RNA, 119 nt, Alicyclobacillus acidiphilus
  misc_feature (1)..(119): AaCas12b gRNA scaffold + guide sequence; oligonucleotide sequence
  misc_feature (1)..(99): AaCas12b gRNA scaffold
gucuaaaggacagaauuuuucaacgggugugccaauggccacuuuccagguggcaaagcccguugaacuucucaaaaagaacgaucugagaaguggcacnnnnnnnnnnnnnnnnnnnn

SEQ ID NO: 343 - protein, 29 aa, Artificial Sequence
  Description of artificial sequence: synthetic polypeptide sequence
PKKKRKVEGADKRTADGSEFESPKKKRKV

SEQ ID NO: 344 - protein, 23 aa, Artificial Sequence
  Description of artificial sequence: synthetic peptide sequence
RKSGKIAAIVVKRPRKPKKKRKV

SEQ ID NO: 345 - protein, 8 aa, Artificial Sequence
  Description of artificial sequence: synthetic peptide sequence
SGGSSGGS

SEQ ID NO: 346 - protein, 1609 aa, Artificial Sequence
  Description of artificial sequence: pNMG-B335 ABE8.1_Y147T_CP5_NGC PAM_monomer polypeptide sequence
MSEVEFSHEYWMRHALTLAKRARDEREVPVGAVLVLNNRVIGEGWNRAIGLHDPTAHAEIMALRQGGLVMQNYRLIDATLYVTFEPCVMCAGAMIHSRIGRVVFGVRNAKTGAAGSLMDVLHYPGMNHRVEITEGILADECAALLCTFFRMPRQVFNAQKKAQSSTDSGGSSGGSSGSETPGTSESATPESSGGSSGGSEIGKATAKYFFYSNIMNFFKTEITLANGEIRKRPLIETNGETGEIVWDKGRDFATVRKVLSMPQVNIVKKTEVQTGGFSKESILPKRNSDKLIARKKDWDPKKYGGFMQPTVAYSVLVVAKVEKGKSKKLKSVKELLGITIMERSSFEKNPIDFLEAKGYKEVKKDLIIKLPKYSLFELENGRKRMLASAKFLQKGNELALPSKYVNFLYLASHYEKLKGSPEDNEQKQLFVEQHKHYLDEIIEQISEFSKRVILADANLDKVLSAYNKHRDKPIREQAENIIHLFTLTNLGAPRAFKYFDTTIARKEYRSTKEVLDATLIHQSITGLYETRIDLSQLGGDGGSGGSGGSGGSGGSGGSGGMDKKYSIGLAIGTNSVGWAVITDEYKVPSKKFKVLGNTDRHSIKKNLIGALLFDSGETAEATRLKRTARRRYTRRKNRICYLQEIFSNEMAKVDDSFFHRLEESFLVEEDKKHERHPIFGNIVDEVAYHEKYPTIYHLRKKLVDSTDKADLRLIYLALAHMIKFRGHFLIEGDLNPDNSDVDKLFIQLVQTYNQLFEENPINASGVDAKAILSARLSKSRRLENLIAQLPGEKKNGLFGNLIALSLGLTPNFKSNFDLAEDAKLQLSKDTYDDDLDNLLAQIGDQYADLFLAAKNLSDAILLSDILRVNTEITKAPLSASMIKRYDEHHQDLTLLKALVRQQLPEKYKEIFFDQSKNGYAGYIDGGASQEEFYKFIKPILEKMDGTEELLVKLNREDLLRKQRTFDNGSIPHQIHLGELHAILRRQEDFYPFLKDNREKIEKILTFRIPYYVGPLARGNSRFAWMTRKSEETITPWNFEEVVDKGASAQSFIERMTNFDKNLPNEKVLPKHSLLYEYFTVYNELTKVKYVTEGMRKPAFLSGEQKKAIVDLLFKTNRKVTVKQLKEDYFKKIECFDSVEISGVEDRFNASLGTYHDLLKIIKDKDFLDNEENEDILEDIVLTLTLFEDREMIEERLKTYAHLFDDKVMKQLKRRRYTGWGRLSRKLINGIRDKQSGKTILDFLKSDGFANRNFMQLIHDDSLTFKEDIQKAQVSGQGDSLHEHIANLAGSPAIKKGILQTVKVVDELVKVMGRHKPENIVIEMARENQTTQKGQKNSRERMKRIEEGIKELGSQILKEHPVENTQLQNEKLYLYYLQNGRDMYVDQELDINRLSDYDVDHIVPQSFLKDDSIDNKVLTRSDKNRGKSDNVPSEEVVKKMKNYWRQLLNAKLITQRKFDNLTKAERGGLSELDKAGFIKRQLVETRQITKHVAQILDSRMNTKYDENDKLIREVKVITLKSKLVSDFRKDFQFYKVREINNYHHAHDAYLNAVVGTALIKKYPKLESEFVYGDYKVYDVRKMIAKSEQEGADKRTADGSEFESPKKKRKV

SEQ ID NO: 347 - protein, 1807 aa, Artificial Sequence
  Description of artificial sequence: pNMG-357_ABE8.14 with NGC PAM CP5 polypeptide sequence
  MISC_FEATURE (1)..(174): Adenosine deaminase sequence
  MISC_FEATURE (175)..(198): Linker sequence
  MISC_FEATURE (199)..(365): Adenosine deaminase sequence
  MISC_FEATURE (366)..(397): Linker sequence
  MISC_FEATURE (398)..(738): Sequence derived from Cas9
  MISC_FEATURE (739)..(759): Linker sequence
  MISC_FEATURE (760)..(1785): Sequence derived from Cas9
  MISC_FEATURE (1786)..(1807): Bipartite nuclear localization sequence
MSEVEFSHEYWMRHALTLAKRAWDEREVPVGAVLVHNNRVIGEGWNRPIGRHDPTAHAEIMALRQGGLVMQNYRLIDATLYVTLEPCVMCAGAMIHSRIGRVVFGARDAKTGAAGSLMDVLHHPGMNHRVEITEGILADECAALLSDFFRMRRQEIKAQKKAQSSTDGGSSGGSSGSETPGTSESATPESSGGSSGGSMSEVEFSHEYWMRHALTLAKRARDEREVPVGAVLVLNNRVIGEGWNRAIGLHDPTAHAEIMALRQGGLVMQNYRLIDATLYVTFEPCVMCAGAMIHSRIGRVVFGVRNAKTGAAGSLMDVLHYPGMNHRVEITEGILADECAALLCTFFRMPRQVFNAQKKAQSSTDSGGSSGGSSGSETPGTSESATPESSGGSSGGSEIGKATAKYFFYSNIMNFFKTEITLANGEIRKRPLIETNGETGEIVWDKGRDFATVRKVLSMPQVNIVKKTEVQTGGFSKESILPKRNSDKLIARKKDWDPKKYGGFMQPTVAYSVLVVAKVEKGKSKKLKSVKELLGITIMERSSFEKNPIDFLEAKGYKEVKKDLIIKLPKYSLFELENGRKRMLASAKFLQKGNELALPSKYVNFLYLASHYEKLKGSPEDNEQKQLFVEQHKHYLDEIIEQISEFSKRVILADANLDKVLSAYNKHRDKPIREQAENIIHLFTLTNLGAPRAFKYFDTTIARKEYRSTKEVLDATLIHQSITGLYETRIDLSQLGGDGGSGGSGGSGGSGGSGGSGGMDKKYSIGLAIGTNSVGWAVITDEYKVPSKKFKVLGNTDRHSIKKNLIGALLFDSGETAEATRLKRTARRRYTRRKNRICYLQEIFSNEMAKVDDSFFHRLEESFLVEEDKKHERHPIFGNIVDEVAYHEKYPTIYHLRKKLVDSTDKADLRLIYLALAHMIKFRGHFLIEGDLNPDNSDVDKLFIQLVQTYNQLFEENPINASGVDAKAILSARLSKSRRLENLIAQLPGEKKNGLFGNLIALSLGLTPNFKSNFDLAEDAKLQLSKDTYDDDLDNLLAQIGDQYADLFLAAKNLSDAILLSDILRVNTEITKAPLSASMIKRYDEHHQDLTLLKALVRQQLPEKYKEIFFDQSKNGYAGYIDGGASQEEFYKFIKPILEKMDGTEELLVKLNREDLLRKQRTFDNGSIPHQIHLGELHAILRRQEDFYPFLKDNREKIEKILTFRIPYYVGPLARGNSRFAWMTRKSEETITPWNFEEVVDKGASAQSFIERMTNFDKNLPNEKVLPKHSLLYEYFTVYNELTKVKYVTEGMRKPAFLSGEQKKAIVDLLFKTNRKVTVKQLKEDYFKKIECFDSVEISGVEDRFNASLGTYHDLLKIIKDKDFLDNEENEDILEDIVLTLTLFEDREMIEERLKTYAHLFDDKVMKQLKRRRYTGWGRLSRKLINGIRDKQSGKTILDFLKSDGFANRNFMQLIHDDSLTFKEDIQKAQVSGQGDSLHEHIANLAGSPAIKKGILQTVKVVDELVKVMGRHKPENIVIEMARENQTTQKGQKNSRERMKRIEEGIKELGSQILKEHPVENTQLQNEKLYLYYLQNGRDMYVDQELDINRLSDYDVDHIVPQSFLKDDSIDNKVLTRSDKNRGKSDNVPSEEVVKKMKNYWRQLLNAKLITQRKFDNLTKAERGGLSELDKAGFIKRQLVETRQITKHVAQILDSRMNTKYDENDKLIREVKVITLKSKLVSDFRKDFQFYKVREINNYHHAHDAYLNAVVGTALIKKYPKLESEFVYGDYKVYDVRKMIAKSEQEGADKRTADGSEFESPKKKRKV

SEQ ID NO: 348 - protein, 1588 aa, Artificial Sequence
  Description of artificial sequence: ABE8.8-m polypeptide sequence
  MISC_FEATURE (1)..(167): Adenosine deaminase sequence
  MISC_FEATURE (168)..(199): Linker sequence
  MISC_FEATURE (200)..(1566): Sequence derived from Cas9
  MISC_FEATURE (1567)..(1588): Bipartite nuclear localization sequence
MSEVEFSHEYWMRHALTLAKRARDEREVPVGAVLVLNNRVIGEGWNRAIGLHDPTAHAEIMALRQGGLVMQNYRLIDATLYVTFEPCVMCAGAMIHSRIGRVVFGVRNAKTGAAGSLMDVLHHPGMNHRVEITEGILADECAALLCRFFRMPRRVFNAQKKAQSSTDSGGSSGGSSGSETPGTSESATPESSGGSSGGSDKKYSIGLAIGTNSVGWAVITDEYKVPSKKFKVLGNTDRHSIKKNLIGALLFDSGETAEATRLKRTARRRYTRRKNRICYLQEIFSNEMAKVDDSFFHRLEESFLVEEDKKHERHPIFGNIVDEVAYHEKYPTIYHLRKKLVDSTDKADLRLIYLALAHMIKFRGHFLIEGDLNPDNSDVDKLFIQLVQTYNQLFEENPINASGVDAKAILSARLSKSRRLENLIAQLPGEKKNGLFGNLIALSLGLTPNFKSNFDLAEDAKLQLSKDTYDDDLDNLLAQIGDQYADLFLAAKNLSDAILLSDILRVNTEITKAPLSASMIKRYDEHHQDLTLLKALVRQQLPEKYKEIFFDQSKNGYAGYIDGGASQEEFYKFIKPILEKMDGTEELLVKLNREDLLRKQRTFDNGSIPHQIHLGELHAILRRQEDFYPFLKDNREKIEKILTFRIPYYVGPLARGNSRFAWMTRKSEETITPWNFEEVVDKGASAQSFIERMTNFDKNLPNEKVLPKHSLLYEYFTVYNELTKVKYVTEGMRKPAFLSGEQKKAIVDLLFKTNRKVTVKQLKEDYFKKIECFDSVEISGVEDRFNASLGTYHDLLKIIKDKDFLDNEENEDILEDIVLTLTLFEDREMIEERLKTYAHLFDDKVMKQLKRRRYTGWGRLSRKLINGIRDKQSGKTILDFLKSDGFANRNFMQLIHDDSLTFKEDIQKAQVSGQGDSLHEHIANLAGSPAIKKGILQTVKVVDELVKVMGRHKPENIVIEMARENQTTQKGQKNSRERMKRIEEGIKELGSQILKEHPVENTQLQNEKLYLYYLQNGRDMYVDQELDINRLSDYDVDHIVPQSFLKDDSIDNKVLTRSDKNRGKSDNVPSEEVVKKMKNYWRQLLNAKLITQRKFDNLTKAERGGLSELDKAGFIKRQLVETRQITKHVAQILDSRMNTKYDENDKLIREVKVITLKSKLVSDFRKDFQFYKVREINNYHHAHDAYLNAVVGTALIKKYPKLESEFVYGDYKVYDVRKMIAKSEQEIGKATAKYFFYSNIMNFFKTEITLANGEIRKRPLIETNGETGEIVWDKGRDFATVRKVLSMPQVNIVKKTEVQTGGFSKESILPKRNSDKLIARKKDWDPKKYGGFDSPTVAYSVLVVAKVEKGKSKKLKSVKELLGITIMERSSFEKNPIDFLEAKGYKEVKKDLIIKLPKYSLFELENGRKRMLASAGELQKGNELALPSKYVNFLYLASHYEKLKGSPEDNEQKQLFVEQHKHYLDEIIEQISEFSKRVILADANLDKVLSAYNKHRDKPIREQAENIIHLFTLTNLGAPAAFKYFDTTIDRKRYTSTKEVLDATLIHQSITGLYETRIDLSQLGGDEGADKRTADGSEFESPKKKRKV

SEQ ID NO: 349 - protein, 1786 aa, Artificial Sequence
  Description of artificial sequence: ABE8.8-d polypeptide sequence
  MISC_FEATURE (1)..(167): Adenosine deaminase sequence
  MISC_FEATURE (168)..(199): Linker sequence
  MISC_FEATURE (200)..(365): Adenosine deaminase sequence
  MISC_FEATURE (366)..(397): Linker sequence
  MISC_FEATURE (398)..(1764): Sequence derived from Cas9
  MISC_FEATURE (1765)..(1786): Bipartite nuclear localization sequence
MSEVEFSHEYWMRHALTLAKRAWDEREVPVGAVLVHNNRVIGEGWNRPIGRHDPTAHAEIMALRQGGLVMQNYRLIDATLYVTLEPCVMCAGAMIHSRIGRVVFGARDAKTGAAGSLMDVLHHPGMNHRVEITEGILADECAALLSDFFRMRRQEIKAQKKAQSSTDSGGSSGGSSGSETPGTSESATPESSGGSSGGSSEVEFSHEYWMRHALTLAKRARDEREVPVGAVLVLNNRVIGEGWNRAIGLHDPTAHAEIMALRQGGLVMQNYRLIDATLYVTFEPCVMCAGAMIHSRIGRVVFGVRNAKTGAAGSLMDVLHHPGMNHRVEITEGILADECAALLCRFFRMPRRVFNAQKKAQSSTDSGGSSGGSSGSETPGTSESATPESSGGSSGGSDKKYSIGLAIGTNSVGWAVITDEYKVPSKKFKVLGNTDRHSIKKNLIGALLFDSGETAEATRLKRTARRRYTRRKNRICYLQEIFSNEMAKVDDSFFHRLEESFLVEEDKKHERHPIFGNIVDEVAYHEKYPTIYHLRKKLVDSTDKADLRLIYLALAHMIKFRGHFLIEGDLNPDNSDVDKLFIQLVQTYNQLFEENPINASGVDAKAILSARLSKSRRLENLIAQLPGEKKNGLFGNLIALSLGLTPNFKSNFDLAEDAKLQLSKDTYDDDLDNLLAQIGDQYADLFLAAKNLSDAILLSDILRVNTEITKAPLSASMIKRYDEHHQDLTLLKALVRQQLPEKYKEIFFDQSKNGYAGYIDGGASQEEFYKFIKPILEKMDGTEELLVKLNREDLLRKQRTFDNGSIPHQIHLGELHAILRRQEDFYPFLKDNREKIEKILTFRIPYYVGPLARGNSRFAWMTRKSEETITPWNFEEVVDKGASAQSFIERMTNFDKNLPNEKVLPKHSLLYEYFTVYNELTKVKYVTEGMRKPAFLSGEQKKAIVDLLFKTNRKVTVKQLKEDYFKKIECFDSVEISGVEDRFNASLGTYHDLLKIIKDKDFLDNEENEDILEDIVLTLTLFEDREMIEERLKTYAHLFDDKVMKQLKRRRYTGWGRLSRKLINGIRDKQSGKTILDFLKSDGFANRNFMQLIHDDSLTFKEDIQKAQVSGQGDSLHEHIANLAGSPAIKKGILQTVKVVDELVKVMGRHKPENIVIEMARENQTTQKGQKNSRERMKRIEEGIKELGSQILKEHPVENTQLQNEKLYLYYLQNGRDMYVDQELDINRLSDYDVDHIVPQSFLKDDSIDNKVLTRSDKNRGKSDNVPSEEVVKKMKNYWRQLLNAKLITQRKFDNLTKAERGGLSELDKAGFIKRQLVETRQITKHVAQILDSRMNTKYDENDKLIREVKVITLKSKLVSDFRKDFQFYKVREINNYHHAHDAYLNAVVGTALIKKYPKLESEFVYGDYKVYDVRKMIAKSEQEIGKATAKYFFYSNIMNFFKTEITLANGEIRKRPLIETNGETGEIVWDKGRDFATVRKVLSMPQVNIVKKTEVQTGGFSKESILPKRNSDKLIARKKDWDPKKYGGFDSPTVAYSVLVVAKVEKGKSKKLKSVKELLGITIMERSSFEKNPIDFLEAKGYKEVKKDLIIKLPKYSLFELENGRKRMLASAGELQKGNELALPSKYVNFLYLASHYEKLKGSPEDNEQKQLFVEQHKHYLDEIIEQISEFSKRVILADANLDKVLSAYNKHRDKPIREQAENIIHLFTLTNLGAPAAFKYFDTTIDRKRYTSTKEVLDATLIHQSITGLYETRIDLSQLGGDEGADKRTADGSEFESPKKKRKV

SEQ ID NO: 350 - protein, 1588 aa, Artificial Sequence
  Description of artificial sequence: ABE8.13-m polypeptide sequence
  MISC_FEATURE (1)..(167): Adenosine deaminase sequence
  MISC_FEATURE (168)..(199): Linker sequence
  MISC_FEATURE (200)..(1566): Sequence derived from Cas9
  MISC_FEATURE (1567)..(1588): Bipartite nuclear localization sequence
MSEVEFSHEYWMRHALTLAKRARDEREVPVGAVLVLNNRVIGEGWNRAIGLHDPTAHAEIMALRQGGLVMQNYRLYDATLYVTFEPCVMCAGAMIHSRIGRVVFGVRNAKTGAAGSLMDVLHHPGMNHRVEITEGILADECAALLCRFFRMPRRVFNAQKKAQSSTDSGGSSGGSSGSETPGTSESATPESSGGSSGGSDKKYSIGLAIGTNSVGWAVITDEYKVPSKKFKVLGNTDRHSIKKNLIGALLFDSGETAEATRLKRTARRRYTRRKNRICYLQEIFSNEMAKVDDSFFHRLEESFLVEEDKKHERHPIFGNIVDEVAYHEKYPTIYHLRKKLVDSTDKADLRLIYLALAHMIKFRGHFLIEGDLNPDNSDVDKLFIQLVQTYNQLFEENPINASGVDAKAILSARLSKSRRLENLIAQLPGEKKNGLFGNLIALSLGLTPNFKSNFDLAEDAKLQLSKDTYDDDLDNLLAQIGDQYADLFLAAKNLSDAILLSDILRVNTEITKAPLSASMIKRYDEHHQDLTLLKALVRQQLPEKYKEIFFDQSKNGYAGYIDGGASQEEFYKFIKPILEKMDGTEELLVKLNREDLLRKQRTFDNGSIPHQIHLGELHAILRRQEDFYPFLKDNREKIEKILTFRIPYYVGPLARGNSRFAWMTRKSEETITPWNFEEVVDKGASAQSFIERMTNFDKNLPNEKVLPKHSLLYEYFTVYNELTKVKYVTEGMRKPAFLSGEQKKAIVDLLFKTNRKVTVKQLKEDYFKKIECFDSVEISGVEDRFNASLGTYHDLLKIIKDKDFLDNEENEDILEDIVLTLTLFEDREMIEERLKTYAHLFDDKVMKQLKRRRYTGWGRLSRKLINGIRDKQSGKTILDFLKSDGFANRNFMQLIHDDSLTFKEDIQKAQVSGQGDSLHEHIANLAGSPAIKKGILQTVKVVDELVKVMGRHKPENIVIEMARENQTTQKGQKNSRERMKRIEEGIKELGSQILKEHPVENTQLQNEKLYLYYLQNGRDMYVDQELDINRLSDYDVDHIVPQSFLKDDSIDNKVLTRSDKNRGKSDNVPSEEVVKKMKNYWRQLLNAKLITQRKFDNLTKAERGGLSELDKAGFIKRQLVETRQITKHVAQILDSRMNTKYDENDKLIREVKVITLKSKLVSDFRKDFQFYKVREINNYHHAHDAYLNAVVGTALIKKYPKLESEFVYGDYKVYDVRKMIAKSEQEIGKATAKYFFYSNIMNFFKTEITLANGEIRKRPLIETNGETGEIVWDKGRDFATVRKVLSMPQVNIVKKTEVQTGGFSKESILPKRNSDKLIARKKDWDPKKYGGFDSPTVAYSVLVVAKVEKGKSKKLKSVKELLGITIMERSSFEKNPIDFLEAKGYKEVKKDLIIKLPKYSLFELENGRKRMLASAGELQKGNELALPSKYVNFLYLASHYEKLKGSPEDNEQKQLFVEQHKHYLDEIIEQISEFSKRVILADANLDKVLSAYNKHRDKPIREQAENIIHLFTLTNLGAPAAFKYFDTTIDRKRYTSTKEVLDATLIHQSITGLYETRIDLSQLGGDEGADKRTADGSEFESPKKKRKV

SEQ ID NO: 351 - protein, 1786 aa, Artificial Sequence
  Description of artificial sequence: ABE8.13-d polypeptide sequence
  MISC_FEATURE (1)..(167): Adenosine deaminase sequence
  MISC_FEATURE (168)..(199): Linker sequence
  MISC_FEATURE (200)..(365): Adenosine deaminase sequence
  MISC_FEATURE (366)..(397): Linker sequence
  MISC_FEATURE (398)..(1764): Sequence derived from Cas9
  MISC_FEATURE (1765)..(1786): Bipartite nuclear localization sequence
MSEVEFSHEYWMRHALTLAKRAWDEREVPVGAVLVHNNRVIGEGWNRPIGRHDPTAHAEIMALRQGGLVMQNYRLIDATLYVTLEPCVMCAGAMIHSRIGRVVFGARDAKTGAAGSLMDVLHHPGMNHRVEITEGILADECAALLSDFFRMRRQEIKAQKKAQSSTDSGGSSGGSSGSETPGTSESATPESSGGSSGGSSEVEFSHEYWMRHALTLAKRARDEREVPVGAVLVLNNRVIGEGWNRAIGLHDPTAHAEIMALRQGGLVMQNYRLYDATLYVTFEPCVMCAGAMIHSRIGRVVFGVRNAKTGAAGSLMDVLHHPGMNHRVEITEGILADECAALLCRFFRMPRRVFNAQKKAQSSTDSGGSSGGSSGSETPGTSESATPESSGGSSGGSDKKYSIGLAIGTNSVGWAVITDEYKVPSKKFKVLGNTDRHSIKKNLIGALLFDSGETAEATRLKRTARRRYTRRKNRICYLQEIFSNEMAKVDDSFFHRLEESFLVEEDKKHERHPIFGNIVDEVAYHEKYPTIYHLRKKLVDSTDKADLRLIYLALAHMIKFRGHFLIEGDLNPDNSDVDKLFIQLVQTYNQLFEENPINASGVDAKAILSARLSKSRRLENLIAQLPGEKKNGLFGNLIALSLGLTPNFKSNFDLAEDAKLQLSKDTYDDDLDNLLAQIGDQYADLFLAAKNLSDAILLSDILRVNTEITKAPLSASMIKRYDEHHQDLTLLKALVRQQLPEKYKEIFFDQSKNGYAGYIDGGASQEEFYKFIKPILEKMDGTEELLVKLNREDLLRKQRTFDNGSIPHQIHLGELHAILRRQEDFYPFLKDNREKIEKILTFRIPYYVGPLARGNSRFAWMTRKSEETITPWNFEEVVDKGASAQSFIERMTNFDKNLPNEKVLPKHSLLYEYFTVYNELTKVKYVTEGMRKPAFLSGEQKKAIVDLLFKTNRKVTVKQLKEDYFKKIECFDSVEISGVEDRFNASLGTYHDLLKIIKDKDFLDNEENEDILEDIVLTLTLFEDREMIEERLKTYAHLFDDKVMKQLKRRRYTGWGRLSRKLINGIRDKQSGKTILDFLKSDGFANRNFMQLIHDDSLTFKEDIQKAQVSGQGDSLHEHIANLAGSPAIKKGILQTVKVVDELVKVMGRHKPENIVIEMARENQTTQKGQKNSRERMKRIEEGIKELGSQILKEHPVENTQLQNEKLYLYYLQNGRDMYVDQELDINRLSDYDVDHIVPQSFLKDDSIDNKVLTRSDKNRGKSDNVPSEEVVKKMKNYWRQLLNAKLITQRKFDNLTKAERGGLSELDKAGFIKRQLVETRQITKHVAQILDSRMNTKYDENDKLIREVKVITLKSKLVSDFRKDFQFYKVREINNYHHAHDAYLNAVVGTALIKKYPKLESEFVYGDYKVYDVRKMIAKSEQEIGKATAKYFFYSNIMNFFKTEITLANGEIRKRPLIETNGETGEIVWDKGRDFATVRKVLSMPQVNIVKKTEVQTGGFSKESILPKRNSDKLIARKKDWDPKKYGGFDSPTVAYSVLVVAKVEKGKSKKLKSVKELLGITIMERSSFEKNPIDFLEAKGYKEVKKDLIIKLPKYSLFELENGRKRMLASAGELQKGNELALPSKYVNFLYLASHYEKLKGSPEDNEQKQLFVEQHKHYLDEIIEQISEFSKRVILADANLDKVLSAYNKHRDKPIREQAENIIHLFTLTNLGAPAAFKYFDTTIDRKRYTSTKEVLDATLIHQSITGLYETRIDLSQLGGDEGADKRTADGSEFESPKKKRKV

SEQ ID NO: 352 - protein, 1588 aa, Artificial Sequence
  Description of artificial sequence: ABE8.17-m polypeptide sequence
  MISC_FEATURE (1)..(167): Adenosine deaminase sequence
  MISC_FEATURE (168)..(199): Linker sequence
  MISC_FEATURE (200)..(1566): Sequence derived from Cas9
  MISC_FEATURE (1567)..(1588): Bipartite nuclear localization sequence
MSEVEFSHEYWMRHALTLAKRARDEREVPVGAVLVLNNRVIGEGWNRAIGLHDPTAHAEIMALRQGGLVMQNYRLIDATLYSTFEPCVMCAGAMIHSRIGRVVFGVRNAKTGAAGSLMDVLHYPGMNHRVEITEGILADECAALLCYFFRMPRRVFNAQKKAQSSTDSGGSSGGSSGSETPGTSESATPESSGGSSGGSDKKYSIGLAIGTNSVGWAVITDEYKVPSKKFKVLGNTDRHSIKKNLIGALLFDSGETAEATRLKRTARRRYTRRKNRICYLQEIFSNEMAKVDDSFFHRLEESFLVEEDKKHERHPIFGNIVDEVAYHEKYPTIYHLRKKLVDSTDKADLRLIYLALAHMIKFRGHFLIEGDLNPDNSDVDKLFIQLVQTYNQLFEENPINASGVDAKAILSARLSKSRRLENLIAQLPGEKKNGLFGNLIALSLGLTPNFKSNFDLAEDAKLQLSKDTYDDDLDNLLAQIGDQYADLFLAAKNLSDAILLSDILRVNTEITKAPLSASMIKRYDEHHQDLTLLKALVRQQLPEKYKEIFFDQSKNGYAGYIDGGASQEEFYKFIKPILEKMDGTEELLVKLNREDLLRKQRTFDNGSIPHQIHLGELHAILRRQEDFYPFLKDNREKIEKILTFRIPYYVGPLARGNSRFAWMTRKSEETITPWNFEEVVDKGASAQSFIERMTNFDKNLPNEKVLPKHSLLYEYFTVYNELTKVKYVTEGMRKPAFLSGEQKKAIVDLLFKTNRKVTVKQLKEDYFKKIECFDSVEISGVEDRFNASLGTYHDLLKIIKDKDFLDNEENEDILEDIVLTLTLFEDREMIEERLKTYAHLFDDKVMKQLKRRRYTGWGRLSRKLINGIRDKQSGKTILDFLKSDGFANRNFMQLIHDDSLTFKEDIQKAQVSGQGDSLHEHIANLAGSPAIKKGILQTVKVVDELVKVMGRHKPENIVIEMARENQTTQKGQKNSRERMKRIEEGIKELGSQILKEHPVENTQLQNEKLYLYYLQNGRDMYVDQELDINRLSDYDVDHIVPQSFLKDDSIDNKVLTRSDKNRGKSDNVPSEEVVKKMKNYWRQLLNAKLITQRKFDNLTKAERGGLSELDKAGFIKRQLVETRQITKHVAQILDSRMNTKYDENDKLIREVKVITLKSKLVSDFRKDFQFYKVREINNYHHAHDAYLNAVVGTALIKKYPKLESEFVYGDYKVYDVRKMIAKSEQEIGKATAKYFFYSNIMNFFKTEITLANGEIRKRPLIETNGETGEIVWDKGRDFATVRKVLSMPQVNIVKKTEVQTGGFSKESILPKRNSDKLIARKKDWDPKKYGGFDSPTVAYSVLVVAKVEKGKSKKLKSVKELLGITIMERSSFEKNPIDFLEAKGYKEVKKDLIIKLPKYSLFELENGRKRMLASAGELQKGNELALPSKYVNFLYLASHYEKLKGSPEDNEQKQLFVEQHKHYLDEIIEQISEFSKRVILADANLDKVLSAYNKHRDKPIREQAENIIHLFTLTNLGAPAAFKYFDTTIDRKRYTSTKEVLDATLIHQSITGLYETRIDLSQLGGDEGADKRTADGSEFESPKKKRKV

SEQ ID NO: 353 - protein, 1786 aa, Artificial Sequence
  Description of artificial sequence: ABE8.17-d polypeptide sequence
  MISC_FEATURE (1)..(167): Adenosine deaminase sequence
  MISC_FEATURE (168)..(199): Linker sequence
  MISC_FEATURE (200)..(365): Adenosine deaminase sequence
  MISC_FEATURE (366)..(397): Linker sequence
  MISC_FEATURE (398)..(1764): Sequence derived from Cas9
  MISC_FEATURE (1765)..(1786): Bipartite nuclear localization sequence
MSEVEFSHEYWMRHALTLAKRAWDEREVPVGAVLVHNNRVIGEGWNRPIGRHDPTAHAEIMALRQGGLVMQNYRLIDATLYVTLEPCVMCAGAMIHSRIGRVVFGARDAKTGAAGSLMDVLHHPGMNHRVEITEGILADECAALLSDFFRMRRQEIKAQKKAQSSTDSGGSSGGSSGSETPGTSESATPESSGGSSGGSSEVEFSHEYWMRHALTLAKRARDEREVPVGAVLVLNNRVIGEGWNRAIGLHDPTAHAEIMALRQGGLVMQNYRLIDATLYSTFEPCVMCAGAMIHSRIGRVVFGVRNAKTGAAGSLMDVLHYPGMNHRVEITEGILADECAALLCYFFRMPRRVFNAQKKAQSSTDSGGSSGGSSGSETPGTSESATPESSGGSSGGSDKKYSIGLAIGTNSVGWAVITDEYKVPSKKFKVLGNTDRHSIKKNLIGALLFDSGETAEATRLKRTARRRYTRRKNRICYLQEIFSNEMAKVDDSFFHRLEESFLVEEDKKHERHPIFGNIVDEVAYHEKYPTIYHLRKKLVDSTDKADLRLIYLALAHMIKFRGHFLIEGDLNPDNSDVDKLFIQLVQTYNQLFEENPINASGVDAKAILSARLSKSRRLENLIAQLPGEKKNGLFGNLIALSLGLTPNFKSNFDLAEDAKLQLSKDTYDDDLDNLLAQIGDQYADLFLAAKNLSDAILLSDILRVNTEITKAPLSASMIKRYDEHHQDLTLLKALVRQQLPEKYKEIFFDQSKNGYAGYIDGGASQEEFYKFIKPILEKMDGTEELLVKLNREDLLRKQRTFDNGSIPHQIHLGELHAILRRQEDFYPFLKDNREKIEKILTFRIPYYVGPLARGNSRFAWMTRKSEETITPWNFEEVVDKGASAQSFIERMTNFDKNLPNEKVLPKHSLLYEYFTVYNELTKVKYVTEGMRKPAFLSGEQKKAIVDLLFKTNRKVTVKQLKEDYFKKIECFDSVEISGVEDRFNASLGTYHDLLKIIKDKDFLDNEENEDILEDIVLTLTLFEDREMIEERLKTYAHLFDDKVMKQLKRRRYTGWGRLSRKLINGIRDKQSGKTILDFLKSDGFANRNFMQLIHDDSLTFKEDIQKAQVSGQGDSLHEHIANLAGSPAIKKGILQTVKVVDELVKVMGRHKPENIVIEMARENQTTQKGQKNSRERMKRIEEGIKELGSQILKEHPVENTQLQNEKLYLYYLQNGRDMYVDQELDINRLSDYDVDHIVPQSFLKDDSIDNKVLTRSDKNRGKSDNVPSEEVVKKMKNYWRQLLNAKLITQRKFDNLTKAERGGLSELDKAGFIKRQLVETRQITKHVAQILDSRMNTKYDENDKLIREVKVITLKSKLVSDFRKDFQFYKVREINNYHHAHDAYLNAVVGTALIKKYPKLESEFVYGDYKVYDVRKMIAKSEQEIGKATAKYFFYSNIMNFFKTEITLANGEIRKRPLIETNGETGEIVWDKGRDFATVRKVLSMPQVNIVKKTEVQTGGFSKESILPKRNSDKLIARKKDWDPKKYGGFDSPTVAYSVLVVAKVEKGKSKKLKSVKELLGITIMERSSFEKNPIDFLEAKGYKEVKKDLIIKLPKYSLFELENGRKRMLASAGELQKGNELALPSKYVNFLYLASHYEKLKGSPEDNEQKQLFVEQHKHYLDEIIEQISEFSKRVILADANLDKVLSAYNKHRDKPIREQAENIIHLFTLTNLGAPAAFKYFDTTIDRKRYTSTKEVLDATLIHQSITGLYETRIDLSQLGGDEGADKRTADGSEFESPKKKRKV

SEQ ID NO: 354 - protein, 1588 aa, Artificial Sequence
  Description of artificial sequence: ABE8.20-m polypeptide sequence
  MISC_FEATURE (1)..(167): Adenosine deaminse sequence
  MISC_FEATURE (168)..(199): Linker sequence
  MISC_FEATURE (200)..(1566): Sequence derived from Cas9
  MISC_FEATURE (1567)..(1588): Bipartite nuclear localization sequence
MSEVEFSHEYWMRHALTLAKRARDEREVPVGAVLVLNNRVIGEGWNRAIGLHDPTAHAEIMALRQGGLVMQNYRLYDATLYSTFEPCVMCAGAMIHSRIGRVVFGVRNAKTGAAGSLMDVLHHPGMNHRVEITEGILADECAALLCRFFRMPRRVFNAQKKAQSSTDSGGSSGGSSGSETPGTSESATPESSGGSSGGSDKKYSIGLAIGTNSVGWAVITDEYKVPSKKFKVLGNTDRHSIKKNLIGALLFDSGETAEATRLKRTARRRYTRRKNRICYLQEIFSNEMAKVDDSFFHRLEESFLVEEDKKHERHPIFGNIVDEVAYHEKYPTIYHLRKKLVDSTDKADLRLIYLALAHMIKFRGHFLIEGDLNPDNSDVDKLFIQLVQTYNQLFEENPINASGVDAKAILSARLSKSRRLENLIAQLPGEKKNGLFGNLIALSLGLTPNFKSNFDLAEDAKLQLSKDTYDDDLDNLLAQIGDQYADLFLAAKNLSDAILLSDILRVNTEITKAPLSASMIKRYDEHHQDLTLLKALVRQQLPEKYKEIFFDQSKNGYAGYIDGGASQEEFYKFIKPILEKMDGTEELLVKLNREDLLRKQRTFDNGSIPHQIHLGELHAILRRQEDFYPFLKDNREKIEKILTFRIPYYVGPLARGNSRFAWMTRKSEETITPWNFEEVVDKGASAQSFIERMTNFDKNLPNEKVLPKHSLLYEYFTVYNELTKVKYVTEGMRKPAFLSGEQKKAIVDLLFKTNRKVTVKQLKEDYFKKIECFDSVEISGVEDRFNASLGTYHDLLKIIKDKDFLDNEENEDILEDIVLTLTLFEDREMIEERLKTYAHLFDDKVMKQLKRRRYTGWGRLSRKLINGIRDKQSGKTILDFLKSDGFANRNFMQLIHDDSLTFKEDIQKAQVSGQGDSLHEHIANLAGSPAIKKGILQTVKVVDELVKVMGRHKPENIVIEMARENQTTQKGQKNSRERMKRIEEGIKELGSQILKEHPVENTQLQNEKLYLYYLQNGRDMYVDQELDINRLSDYDVDHIVPQSFLKDDSIDNKVLTRSDKNRGKSDNVPSEEVVKKMKNYWRQLLNAKLITQRKFDNLTKAERGGLSELDKAGFIKRQLVETRQITKHVAQILDSRMNTKYDENDKLIREVKVITLKSKLVSDFRKDFQFYKVREINNYHHAHDAYLNAVVGTALIKKYPKLESEFVYGDYKVYDVRKMIAKSEQEIGKATAKYFFYSNIMNFFKTEITLANGEIRKRPLIETNGETGEIVWDKGRDFATVRKVLSMPQVNIVKKTEVQTGGFSKESILPKRNSDKLIARKKDWDPKKYGGFDSPTVAYSVLVVAKVEKGKSKKLKSVKELLGITIMERSSFEKNPIDFLEAKGYKEVKKDLIIKLPKYSLFELENGRKRMLASAGELQKGNELALPSKYVNFLYLASHYEKLKGSPEDNEQKQLFVEQHKHYLDEIIEQISEFSKRVILADANLDKVLSAYNKHRDKPIREQAENIIHLFTLTNLGAPAAFKYFDTTIDRKRYTSTKEVLDATLIHQSITGLYETRIDLSQLGGDEGADKRTADGSEFESPKKKRKV

SEQ ID NO: 355 - protein, 1786 aa, Artificial Sequence
  Description of artificial sequence: ABE8.20-d polypeptide sequence
  MISC_FEATURE (1)..(167): Adenosine deaminase sequence
  MISC_FEATURE (168)..(199): Linker sequence
  MISC_FEATURE (200)..(365): Adenosine deaminase sequence
  MISC_FEATURE (366)..(397): Linker sequence
  MISC_FEATURE (398)..(1764): Sequence derived from Cas9
  MISC_FEATURE (1765)..(1786): Bipartite nuclear localization sequence
MSEVEFSHEYWMRHALTLAKRAWDEREVPVGAVLVHNNRVIGEGWNRPIGRHDPTAHAEIMALRQGGLVMQNYRLIDATLYVTLEPCVMCAGAMIHSRIGRVVFGARDAKTGAAGSLMDVLHHPGMNHRVEITEGILADECAALLSDFFRMRRQEIKAQKKAQSSTDSGGSSGGSSGSETPGTSESATPESSGGSSGGSSEVEFSHEYWMRHALTLAKRARDEREVPVGAVLVLNNRVIGEGWNRAIGLHDPTAHAEIMALRQGGLVMQNYRLYDATLYSTFEPCVMCAGAMIHSRIGRVVFGVRNAKTGAAGSLMDVLHHPGMNHRVEITEGILADECAALLCRFFRMPRRVFNAQKKAQSSTDSGGSSGGSSGSETPGTSESATPESSGGSSGGSDKKYSIGLAIGTNSVGWAVITDEYKVPSKKFKVLGNTDRHSIKKNLIGALLFDSGETAEATRLKRTARRRYTRRKNRICYLQEIFSNEMAKVDDSFFHRLEESFLVEEDKKHERHPIFGNIVDEVAYHEKYPTIYHLRKKLVDSTDKADLRLIYLALAHMIKFRGHFLIEGDLNPDNSDVDKLFIQLVQTYNQLFEENPINASGVDAKAILSARLSKSRRLENLIAQLPGEKKNGLFGNLIALSLGLTPNFKSNFDLAEDAKLQLSKDTYDDDLDNLLAQIGDQYADLFLAAKNLSDAILLSDILRVNTEITKAPLSASMIKRYDEHHQDLTLLKALVRQQLPEKYKEIFFDQSKNGYAGYIDGGASQEEFYKFIKPILEKMDGTEELLVKLNREDLLRKQRTFDNGSIPHQIHLGELHAILRRQEDFYPFLKDNREKIEKILTFRIPYYVGPLARGNSRFAWMTRKSEETITPWNFEEVVDKGASAQSFIERMTNFDKNLPNEKVLPKHSLLYEYFTVYNELTKVKYVTEGMRKPAFLSGEQKKAIVDLLFKTNRKVTVKQLKEDYFKKIECFDSVEISGVEDRFNASLGTYHDLLKIIKDKDFLDNEENEDILEDIVLTLTLFEDREMIEERLKTYAHLFDDKVMKQLKRRRYTGWGRLSRKLINGIRDKQSGKTILDFLKSDGFANRNFMQLIHDDSLTFKEDIQKAQVSGQGDSLHEHIANLAGSPAIKKGILQTVKVVDELVKVMGRHKPENIVIEMARENQTTQKGQKNSRERMKRIEEGIKELGSQILKEHPVENTQLQNEKLYLYYLQNGRDMYVDQELDINRLSDYDVDHIVPQSFLKDDSIDNKVLTRSDKNRGKSDNVPSEEVVKKMKNYWRQLLNAKLITQRKFDNLTKAERGGLSELDKAGFIKRQLVETRQITKHVAQILDSRMNTKYDENDKLIREVKVITLKSKLVSDFRKDFQFYKVREINNYHHAHDAYLNAVVGTALIKKYPKLESEFVYGDYKVYDVRKMIAKSEQEIGKATAKYFFYSNIMNFFKTEITLANGEIRKRPLIETNGETGEIVWDKGRDFATVRKVLSMPQVNIVKKTEVQTGGFSKESILPKRNSDKLIARKKDWDPKKYGGFDSPTVAYSVLVVAKVEKGKSKKLKSVKELLGITIMERSSFEKNPIDFLEAKGYKEVKKDLIIKLPKYSLFELENGRKRMLASAGELQKGNELALPSKYVNFLYLASHYEKLKGSPEDNEQKQLFVEQHKHYLDEIIEQISEFSKRVILADANLDKVLSAYNKHRDKPIREQAENIIHLFTLTNLGAPAAFKYFDTTIDRKRYTSTKEVLDATLIHQSITGLYETRIDLSQLGGDEGADKRTADGSEFESPKKKRKV

SEQ ID NO: 356 - protein, 1588 aa, Artificial Sequence
  Description of artificial sequence: 01. monoABE8.1_bpNLS + Y147T polypeptide sequence
MSEVEFSHEYWMRHALTLAKRARDEREVPVGAVLVLNNRVIGEGWNRAIGLHDPTAHAEIMALRQGGLVMQNYRLIDATLYVTFEPCVMCAGAMIHSRIGRVVFGVRNAKTGAAGSLMDVLHYPGMNHRVEITEGILADECAALLCTFFRMPRQVFNAQKKAQSSTDSGGSSGGSSGSETPGTSESATPESSGGSSGGSDKKYSIGLAIGTNSVGWAVITDEYKVPSKKFKVLGNTDRHSIKKNLIGALLFDSGETAEATRLKRTARRRYTRRKNRICYLQEIFSNEMAKVDDSFFHRLEESFLVEEDKKHERHPIFGNIVDEVAYHEKYPTIYHLRKKLVDSTDKADLRLIYLALAHMIKFRGHFLIEGDLNPDNSDVDKLFIQLVQTYNQLFEENPINASGVDAKAILSARLSKSRRLENLIAQLPGEKKNGLFGNLIALSLGLTPNFKSNFDLAEDAKLQLSKDTYDDDLDNLLAQIGDQYADLFLAAKNLSDAILLSDILRVNTEITKAPLSASMIKRYDEHHQDLTLLKALVRQQLPEKYKEIFFDQSKNGYAGYIDGGASQEEFYKFIKPILEKMDGTEELLVKLNREDLLRKQRTFDNGSIPHQIHLGELHAILRRQEDFYPFLKDNREKIEKILTFRIPYYVGPLARGNSRFAWMTRKSEETITPWNFEEVVDKGASAQSFIERMTNFDKNLPNEKVLPKHSLLYEYFTVYNELTKVKYVTEGMRKPAFLSGEQKKAIVDLLFKTNRKVTVKQLKEDYFKKIECFDSVEISGVEDRFNASLGTYHDLLKIIKDKDFLDNEENEDILEDIVLTLTLFEDREMIEERLKTYAHLFDDKVMKQLKRRRYTGWGRLSRKLINGIRDKQSGKTILDFLKSDGFANRNFMQLIHDDSLTFKEDIQKAQVSGQGDSLHEHIANLAGSPAIKKGILQTVKVVDELVKVMGRHKPENIVIEMARENQTTQKGQKNSRERMKRIEEGIKELGSQILKEHPVENTQLQNEKLYLYYLQNGRDMYVDQELDINRLSDYDVDHIVPQSFLKDDSIDNKVLTRSDKNRGKSDNVPSEEVVKKMKNYWRQLLNAKLITQRKFDNLTKAERGGLSELDKAGFIKRQLVETRQITKHVAQILDSRMNTKYDENDKLIREVKVITLKSKLVSDFRKDFQFYKVREINNYHHAHDAYLNAVVGTALIKKYPKLESEFVYGDYKVYDVRKMIAKSEQEIGKATAKYFFYSNIMNFFKTEITLANGEIRKRPLIETNGETGEIVWDKGRDFATVRKVLSMPQVNIVKKTEVQTGGFSKESILPKRNSDKLIARKKDWDPKKYGGFVSPTVAYSVLVVAKVEKGKSKKLKSVKELLGITIMERSSFEKNPIDFLEAKGYKEVKKDLIIKLPKYSLFELENGRKRMLASARELQKGNELALPSKYVNFLYLASHYEKLKGSPEDNEQKQLFVEQHKHYLDEIIEQISEFSKRVILADANLDKVLSAYNKHRDKPIREQAENIIHLFTLTNLGAPAAFKYFDTTIDRKQYRSTKEVLDATLIHQSITGLYETRIDLSQLGGDEGADKRTADGSEFESPKKKRKV

SEQ ID NO: 357 - protein, 1588 aa, Artificial Sequence
  Description of artificial sequence: 02. monoABE8.1_bpNLS + Y147R polypeptide sequence
MSEVEFSHEYWMRHALTLAKRARDEREVPVGAVLVLNNRVIGEGWNRAIGLHDPTAHAEIMALRQGGLVMQNYRLIDATLYVTFEPCVMCAGAMIHSRIGRVVFGVRNAKTGAAGSLMDVLHYPGMNHRVEITEGILADECAALLCRFFRMPRQVFNAQKKAQSSTDSGGSSGGSSGSETPGTSESATPESSGGSSGGSDKKYSIGLAIGTNSVGWAVITDEYKVPSKKFKVLGNTDRHSIKKNLIGALLFDSGETAEATRLKRTARRRYTRRKNRICYLQEIFSNEMAKVDDSFFHRLEESFLVEEDKKHERHPIFGNIVDEVAYHEKYPTIYHLRKKLVDSTDKADLRLIYLALAHMIKFRGHFLIEGDLNPDNSDVDKLFIQLVQTYNQLFEENPINASGVDAKAILSARLSKSRRLENLIAQLPGEKKNGLFGNLIALSLGLTPNFKSNFDLAEDAKLQLSKDTYDDDLDNLLAQIGDQYADLFLAAKNLSDAILLSDILRVNTEITKAPLSASMIKRYDEHHQDLTLLKALVRQQLPEKYKEIFFDQSKNGYAGYIDGGASQEEFYKFIKPILEKMDGTEELLVKLNREDLLRKQRTFDNGSIPHQIHLGELHAILRRQEDFYPFLKDNREKIEKILTFRIPYYVGPLARGNSRFAWMTRKSEETITPWNFEEVVDKGASAQSFIERMTNFDKNLPNEKVLPKHSLLYEYFTVYNELTKVKYVTEGMRKPAFLSGEQKKAIVDLLFKTNRKVTVKQLKEDYFKKIECFDSVEISGVEDRFNASLGTYHDLLKIIKDKDFLDNEENEDILEDIVLTLTLFEDREMIEERLKTYAHLFDDKVMKQLKRRRYTGWGRLSRKLINGIRDKQSGKTILDFLKSDGFANRNFMQLIHDDSLTFKEDIQKAQVSGQGDSLHEHIANLAGSPAIKKGILQTVKVVDELVKVMGRHKPENIVIEMARENQTTQKGQKNSRERMKRIEEGIKELGSQILKEHPVENTQLQNEKLYLYYLQNGRDMYVDQELDINRLSDYDVDHIVPQSFLKDDSIDNKVLTRSDKNRGKSDNVPSEEVVKKMKNYWRQLLNAKLITQRKFDNLTKAERGGLSELDKAGFIKRQLVETRQITKHVAQILDSRMNTKYDENDKLIREVKVITLKSKLVSDFRKDFQFYKVREINNYHHAHDAYLNAVVGTALIKKYPKLESEFVYGDYKVYDVRKMIAKSEQEIGKATAKYFFYSNIMNFFKTEITLANGEIRKRPLIETNGETGEIVWDKGRDFATVRKVLSMPQVNIVKKTEVQTGGFSKESILPKRNSDKLIARKKDWDPKKYGGFVSPTVAYSVLVVAKVEKGKSKKLKSVKELLGITIMERSSFEKNPIDFLEAKGYKEVKKDLIIKLPKYSLFELENGRKRMLASARELQKGNELALPSKYVNFLYLASHYEKLKGSPEDNEQKQLFVEQHKHYLDEIIEQISEFSKRVILADANLDKVLSAYNKHRDKPIREQAENIIHLFTLTNLGAPAAFKYFDTTIDRKQYRSTKEVLDATLIHQSITGLYETRIDLSQLGGDEGADKRTADGSEFESPKKKRKV

SEQ ID NO: 358 - protein, 1588 aa, Artificial Sequence
  Description of artificial sequence: 03. monoABE8.1_bpNLS + Q154S polypeptide sequence
MSEVEFSHEYWMRHALTLAKRARDEREVPVGAVLVLNNRVIGEGWNRAIGLHDPTAHAEIMALRQGGLVMQNYRLIDATLYVTFEPCVMCAGAMIHSRIGRVVFGVRNAKTGAAGSLMDVLHYPGMNHRVEITEGILADECAALLCYFFRMPRSVFNAQKKAQSSTDSGGSSGGSSGSETPGTSESATPESSGGSSGGSDKKYSIGLAIGTNSVGWAVITDEYKVPSKKFKVLGNTDRHSIKKNLIGALLFDSGETAEATRLKRTARRRYTRRKNRICYLQEIFSNEMAKVDDSFFHRLEESFLVEEDKKHERHPIFGNIVDEVAYHEKYPTIYHLRKKLVDSTDKADLRLIYLALAHMIKFRGHFLIEGDLNPDNSDVDKLFIQLVQTYNQLFEENPINASGVDAKAILSARLSKSRRLENLIAQLPGEKKNGLFGNLIALSLGLTPNFKSNFDLAEDAKLQLSKDTYDDDLDNLLAQIGDQYADLFLAAKNLSDAILLSDILRVNTEITKAPLSASMIKRYDEHHQDLTLLKALVRQQLPEKYKEIFFDQSKNGYAGYIDGGASQEEFYKFIKPILEKMDGTEELLVKLNREDLLRKQRTFDNGSIPHQIHLGELHAILRRQEDFYPFLKDNREKIEKILTFRIPYYVGPLARGNSRFAWMTRKSEETITPWNFEEVVDKGASAQSFIERMTNFDKNLPNEKVLPKHSLLYEYFTVYNELTKVKYVTEGMRKPAFLSGEQKKAIVDLLFKTNRKVTVKQLKEDYFKKIECFDSVEISGVEDRFNASLGTYHDLLKIIKDKDFLDNEENEDILEDIVLTLTLFEDREMIEERLKTYAHLFDDKVMKQLKRRRYTGWGRLSRKLINGIRDKQSGKTILDFLKSDGFANRNFMQLIHDDSLTFKEDIQKAQVSGQGDSLHEHIANLAGSPAIKKGILQTVKVVDELVKVMGRHKPENIVIEMARENQTTQKGQKNSRERMKRIEEGIKELGSQILKEHPVENTQLQNEKLYLYYLQNGRDMYVDQELDINRLSDYDVDHIVPQSFLKDDSIDNKVLTRSDKNRGKSDNVPSEEVVKKMKNYWRQLLNAKLITQRKFDNLTKAERGGLSELDKAGFIKRQLVETRQITKHVAQILDSRMNTKYDENDKLIREVKVITLKSKLVSDFRKDFQFYKVREINNYHHAHDAYLNAVVGTALIKKYPKLESEFVYGDYKVYDVRKMIAKSEQEIGKATAKYFFYSNIMNFFKTEITLANGEIRKRPLIETNGETGEIVWDKGRDFATVRKVLSMPQVNIVKKTEVQTGGFSKESILPKRNSDKLIARKKDWDPKKYGGFVSPTVAYSVLVVAKVEKGKSKKLKSVKELLGITIMERSSFEKNPIDFLEAKGYKEVKKDLIIKLPKYSLFELENGRKRMLASARELQKGNELALPSKYVNFLYLASHYEKLKGSPEDNEQKQLFVEQHKHYLDEIIEQISEFSKRVILADANLDKVLSAYNKHRDKPIREQAENIIHLFTLTNLGAPAAFKYFDTTIDRKQYRSTKEVLDATLIHQSITGLYETRIDLSQLGGDEGADKRTADGSEFESPKKKRKV

SEQ ID NO: 359 - protein, 1588 aa, Artificial Sequence
  Description of artificial sequence: 04. monoABE8.1_bpNLS + Y123H polypeptide sequence
MSEVEFSHEYWMRHALTLAKRARDEREVPVGAVLVLNNRVIGEGWNRAIGLHDPTAHAEIMALRQGGLVMQNYRLIDATLYVTFEPCVMCAGAMIHSRIGRVVFGVRNAKTGAAGSLMDVLHHPGMNHRVEITEGILADECAALLCYFFRMPRQVFNAQKKAQSSTDSGGSSGGSSGSETPGTSESATPESSGGSSGGSDKKYSIGLAIGTNSVGWAVITDEYKVPSKKFKVLGNTDRHSIKKNLIGALLFDSGETAEATRLKRTARRRYTRRKNRICYLQEIFSNEMAKVDDSFFHRLEESFLVEEDKKHERHPIFGNIVDEVAYHEKYPTIYHLRKKLVDSTDKADLRLIYLALAHMIKFRGHFLIEGDLNPDNSDVDKLFIQLVQTYNQLFEENPINASGVDAKAILSARLSKSRRLENLIAQLPGEKKNGLFGNLIALSLGLTPNFKSNFDLAEDAKLQLSKDTYDDDLDNLLAQIGDQYADLFLAAKNLSDAILLSDILRVNTEITKAPLSASMIKRYDEHHQDLTLLKALVRQQLPEKYKEIFFDQSKNGYAGYIDGGASQEEFYKFIKPILEKMDGTEELLVKLNREDLLRKQRTFDNGSIPHQIHLGELHAILRRQEDFYPFLKDNREKIEKILTFRIPYYVGPLARGNSRFAWMTRKSEETITPWNFEEVVDKGASAQSFIERMTNFDKNLPNEKVLPKHSLLYEYFTVYNELTKVKYVTEGMRKPAFLSGEQKKAIVDLLFKTNRKVTVKQLKEDYFKKIECFDSVEISGVEDRFNASLGTYHDLLKIIKDKDFLDNEENEDILEDIVLTLTLFEDREMIEERLKTYAHLFDDKVMKQLKRRRYTGWGRLSRKLINGIRDKQSGKTILDFLKSDGFANRNFMQLIHDDSLTFKEDIQKAQVSGQGDSLHEHIANLAGSPAIKKGILQTVKVVDELVKVMGRHKPENIVIEMARENQTTQKGQKNSRERMKRIEEGIKELGSQILKEHPVENTQLQNEKLYLYYLQNGRDMYVDQELDINRLSDYDVDHIVPQSFLKDDSIDNKVLTRSDKNRGKSDNVPSEEVVKKMKNYWRQLLNAKLITQRKFDNLTKAERGGLSELDKAGFIKRQLVETRQITKHVAQILDSRMNTKYDENDKLIREVKVITLKSKLVSDFRKDFQFYKVREINNYHHAHDAYLNAVVGTALIKKYPKLESEFVYGDYKVYDVRKMIAKSEQEIGKATAKYFFYSNIMNFFKTEITLANGEIRKRPLIETNGETGEIVWDKGRDFATVRKVLSMPQVNIVKKTEVQTGGFSKESILPKRNSDKLIARKKDWDPKKYGGFVSPTVAYSVLVVAKVEKGKSKKLKSVKELLGITIMERSSFEKNPIDFLEAKGYKEVKKDLIIKLPKYSLFELENGRKRMLASARELQKGNELALPSKYVNFLYLASHYEKLKGSPEDNEQKQLFVEQHKHYLDEIIEQISEFSKRVILADANLDKVLSAYNKHRDKPIREQAENIIHLFTLTNLGAPAAFKYFDTTIDRKQYRSTKEVLDATLIHQSITGLYETRIDLSQLGGDEGADKRTADGSEFESPKKKRKV

SEQ ID NO: 360 - protein, 1588 aa, Artificial Sequence
  Description of artificial sequence: 05. monoABE8.1_bpNLS + V82S polypeptide sequence
MSEVEFSHEYWMRHALTLAKRARDEREVPVGAVLVLNNRVIGEGWNRAIGLHDPTAHAEIMALRQGGLVMQNYRLIDATLYSTFEPCVMCAGAMIHSRIGRVVFGVRNAKTGAAGSLMDVLHYPGMNHRVEITEGILADECAALLCYFFRMPRQVFNAQKKAQSSTDSGGSSGGSSGSETPGTSESATPESSGGSSGGSDKKYSIGLAIGTNSVGWAVITDEYKVPSKKFKVLGNTDRHSIKKNLIGALLFDSGETAEATRLKRTARRRYTRRKNRICYLQEIFSNEMAKVDDSFFHRLEESFLVEEDKKHERHPIFGNIVDEVAYHEKYPTIYHLRKKLVDSTDKADLRLIYLALAHMIKFRGHFLIEGDLNPDNSDVDKLFIQLVQTYNQLFEENPINASGVDAKAILSARLSKSRRLENLIAQLPGEKKNGLFGNLIALSLGLTPNFKSNFDLAEDAKLQLSKDTYDDDLDNLLAQIGDQYADLFLAAKNLSDAILLSDILRVNTEITKAPLSASMIKRYDEHHQDLTLLKALVRQQLPEKYKEIFFDQSKNGYAGYIDGGASQEEFYKFIKPILEKMDGTEELLVKLNREDLLRKQRTFDNGSIPHQIHLGELHAILRRQEDFYPFLKDNREKIEKILTFRIPYYVGPLARGNSRFAWMTRKSEETITPWNFEEVVDKGASAQSFIERMTNFDKNLPNEKVLPKHSLLYEYFTVYNELTKVKYVTEGMRKPAFLSGEQKKAIVDLLFKTNRKVTVKQLKEDYFKKIECFDSVEISGVEDRFNASLGTYHDLLKIIKDKDFLDNEENEDILEDIVLTLTLFEDREMIEERLKTYAHLFDDKVMKQLKRRRYTGWGRLSRKLINGIRDKQSGKTILDFLKSDGFANRNFMQLIHDDSLTFKEDIQKAQVSGQGDSLHEHIANLAGSPAIKKGILQTVKVVDELVKVMGRHKPENIVIEMARENQTTQKGQKNSRERMKRIEEGIKELGSQILKEHPVENTQLQNEKLYLYYLQNGRDMYVDQELDINRLSDYDVDHIVPQSFLKDDSIDNKVLTRSDKNRGKSDNVPSEEVVKKMKNYWRQLLNAKLITQRKFDNLTKAERGGLSELDKAGFIKRQLVETRQITKHVAQILDSRMNTKYDENDKLIREVKVITLKSKLVSDFRKDFQFYKVREINNYHHAHDAYLNAVVGTALIKKYPKLESEFVYGDYKVYDVRKMIAKSEQEIGKATAKYFFYSNIMNFFKTEITLANGEIRKRPLIETNGETGEIVWDKGRDFATVRKVLSMPQVNIVKKTEVQTGGFSKESILPKRNSDKLIARKKDWDPKKYGGFVSPTVAYSVLVVAKVEKGKSKKLKSVKELLGITIMERSSFEKNPIDFLEAKGYKEVKKDLIIKLPKYSLFELENGRKRMLASARELQKGNELALPSKYVNFLYLASHYEKLKGSPEDNEQKQLFVEQHKHYLDEIIEQISEFSKRVILADANLDKVLSAYNKHRDKPIREQAENIIHLFTLTNLGAPAAFKYFDTTIDRKQYRSTKEVLDATLIHQSITGLYETRIDLSQLGGDEGADKRTADGSEFESPKKKRKV

SEQ ID NO: 361 - protein, 1588 aa, Artificial Sequence
  Description of artificial sequence: 06. monoABE8.1_bpNLS + T166R polypeptide sequence
MSEVEFSHEYWMRHALTLAKRARDEREVPVGAVLVLNNRVIGEGWNRAIGLHDPTAHAEIMALRQGGLVMQNYRLIDATLYVTFEPCVMCAGAMIHSRIGRVVFGVRNAKTGAAGSLMDVLHYPGMNHRVEITEGILADECAALLCYFFRMPRQVFNAQKKAQSSRDSGGSSGGSSGSETPGTSESATPESSGGSSGGSDKKYSIGLAIGTNSVGWAVITDEYKVPSKKFKVLGNTDRHSIKKNLIGALLFDSGETAEATRLKRTARRRYTRRKNRICYLQEIFSNEMAKVDDSFFHRLEESFLVEEDKKHERHPIFGNIVDEVAYHEKYPTIYHLRKKLVDSTDKADLRLIYLALAHMIKFRGHFLIEGDLNPDNSDVDKLFIQLVQTYNQLFEENPINASGVDAKAILSARLSKSRRLENLIAQLPGEKKNGLFGNLIALSLGLTPNFKSNFDLAEDAKLQLSKDTYDDDLDNLLAQIGDQYADLFLAAKNLSDAILLSDILRVNTEITKAPLSASMIKRYDEHHQDLTLLKALVRQQLPEKYKEIFFDQSKNGYAGYIDGGASQEEFYKFIKPILEKMDGTEELLVKLNREDLLRKQRTFDNGSIPHQIHLGELHAILRRQEDFYPFLKDNREKIEKILTFRIPYYVGPLARGNSRFAWMTRKSEETITPWNFEEVVDKGASAQSFIERMTNFDKNLPNEKVLPKHSLLYEYFTVYNELTKVKYVTEGMRKPAFLSGEQKKAIVDLLFKTNRKVTVKQLKEDYFKKIECFDSVEISGVEDRFNASLGTYHDLLKIIKDKDFLDNEENEDILEDIVLTLTLFEDREMIEERLKTYAHLFDDKVMKQLKRRRYTGWGRLSRKLINGIRDKQSGKTILDFLKSDGFANRNFMQLIHDDSLTFKEDIQKAQVSGQGDSLHEHIANLAGSPAIKKGILQTVKVVDELVKVMGRHKPENIVIEMARENQTTQKGQKNSRERMKRIEEGIKELGSQILKEHPVENTQLQNEKLYLYYLQNGRDMYVDQELDINRLSDYDVDHIVPQSFLKDDSIDNKVLTRSDKNRGKSDNVPSEEVVKKMKNYWRQLLNAKLITQRKFDNLTKAERGGLSELDKAGFIKRQLVETRQITKHVAQILDSRMNTKYDENDKLIREVKVITLKSKLVSDFRKDFQFYKVREINNYHHAHDAYLNAVVGTALIKKYPKLESEFVYGDYKVYDVRKMIAKSEQEIGKATAKYFFYSNIMNFFKTEITLANGEIRKRPLIETNGETGEIVWDKGRDFATVRKVLSMPQVNIVKKTEVQTGGFSKESILPKRNSDKLIARKKDWDPKKYGGFVSPTVAYSVLVVAKVEKGKSKKLKSVKELLGITIMERSSFEKNPIDFLEAKGYKEVKKDLIIKLPKYSLFELENGRKRMLASARELQKGNELALPSKYVNFLYLASHYEKLKGSPEDNEQKQLFVEQHKHYLDEIIEQISEFSKRVILADANLDKVLSAYNKHRDKPIREQAENIIHLFTLTNLGAPAAFKYFDTTIDRKQYRSTKEVLDATLIHQSITGLYETRIDLSQLGGDEGADKRTADGSEFESPKKKRKV

SEQ ID NO: 362 - protein, 1588 aa, Artificial Sequence
  Description of artificial sequence: 07. monoABE8.1_bpNLS + Q154R polypeptide sequence
MSEVEFSHEYWMRHALTLAKRARDEREVPVGAVLVLNNRVIGEGWNRAIGLHDPTAHAEIMALRQGGLVMQNYRLIDATLYVTFEPCVMCAGAMIHSRIGRVVFGVRNAKTGAAGSLMDVLHYPGMNHRVEITEGILADECAALLCYFFRMPRRVFNAQKKAQSSTDSGGSSGGSSGSETPGTSESATPESSGGSSGGSDKKYSIGLAIGTNSVGWAVITDEYKVPSKKFKVLGNTDRHSIKKNLIGALLFDSGETAEATRLKRTARRRYTRRKNRICYLQEIFSNEMAKVDDSFFHRLEESFLVEEDKKHERHPIFGNIVDEVAYHEKYPTIYHLRKKLVDSTDKADLRLIYLALAHMIKFRGHFLIEGDLNPDNSDVDKLFIQLVQTYNQLFEENPINASGVDAKAILSARLSKSRRLENLIAQLPGEKKNGLFGNLIALSLGLTPNFKSNFDLAEDAKLQLSKDTYDDDLDNLLAQIGDQYADLFLAAKNLSDAILLSDILRVNTEITKAPLSASMIKRYDEHHQDLTLLKALVRQQLPEKYKEIFFDQSKNGYAGYIDGGASQEEFYKFIKPILEKMDGTEELLVKLNREDLLRKQRTFDNGSIPHQIHLGELHAILRRQEDFYPFLKDNREKIEKILTFRIPYYVGPLARGNSRFAWMTRKSEETITPWNFEEVVDKGASAQSFIERMTNFDKNLPNEKVLPKHSLLYEYFTVYNELTKVKYVTEGMRKPAFLSGEQKKAIVDLLFKTNRKVTVKQLKEDYFKKIECFDSVEISGVEDRFNASLGTYHDLLKIIKDKDFLDNEENEDILEDIVLTLTLFEDREMIEERLKTYAHLFDDKVMKQLKRRRYTGWGRLSRKLINGIRDKQSGKTILDFLKSDGFANRNFMQLIHDDSLTFKEDIQKAQVSGQGDSLHEHIANLAGSPAIKKGILQTVKVVDELVKVMGRHKPENIVIEMARENQTTQKGQKNSRERMKRIEEGIKELGSQILKEHPVENTQLQNEKLYLYYLQNGRDMYVDQELDINRLSDYDVDHIVPQSFLKDDSIDNKVLTRSDKNRGKSDNVPSEEVVKKMKNYWRQLLNAKLITQRKFDNLTKAERGGLSELDKAGFIKRQLVETRQITKHVAQILDSRMNTKYDENDKLIREVKVITLKSKLVSDFRKDFQFYKVREINNYHHAHDAYLNAVVGTALIKKYPKLESEFVYGDYKVYDVRKMIAKSEQEIGKATAKYFFYSNIMNFFKTEITLANGEIRKRPLIETNGETGEIVWDKGRDFATVRKVLSMPQVNIVKKTEVQTGGFSKESILPKRNSDKLIARKKDWDPKKYGGFVSPTVAYSVLVVAKVEKGKSKKLKSVKELLGITIMERSSFEKNPIDFLEAKGYKEVKKDLIIKLPKYSLFELENGRKRMLASARELQKGNELALPSKYVNFLYLASHYEKLKGSPEDNEQKQLFVEQHKHYLDEIIEQISEFSKRVILADANLDKVLSAYNKHRDKPIREQAENIIHLFTLTNLGAPAAFKYFDTTIDRKQYRSTKEVLDATLIHQSITGLYETRIDLSQLGGDEGADKRTADGSEFESPKKKRKV

SEQ ID NO: 363 - protein, 1588 aa, Artificial Sequence
  Description of artificial sequence: 08. monoABE8.1_bpNLS + Y147R_Q154R_Y123H polypeptide sequence
MSEVEFSHEYWMRHALTLAKRARDEREVPVGAVLVLNNRVIGEGWNRAIGLHDPTAHAEIMALRQGGLVMQNYRLIDATLYVTFEPCVMCAGAMIHSRIGRVVFGVRNAKTGAAGSLMDVLHHPGMNHRVEITEGILADECAALLCRFFRMPRRVFNAQKKAQSSTDSGGSSGGSSGSETPGTSESATPESSGGSSGGSDKKYSIGLAIGTNSVGWAVITDEYKVPSKKFKVLGNTDRHSIKKNLIGALLFDSGETAEATRLKRTARRRYTRRKNRICYLQEIFSNEMAKVDDSFFHRLEESFLVEEDKKHERHPIFGNIVDEVAYHEKYPTIYHLRKKLVDSTDKADLRLIYLALAHMIKFRGHFLIEGDLNPDNSDVDKLFIQLVQTYNQLFEENPINASGVDAKAILSARLSKSRRLENLIAQLPGEKKNGLFGNLIALSLGLTPNFKSNFDLAEDAKLQLSKDTYDDDLDNLLAQIGDQYADLFLAAKNLSDAILLSDILRVNTEITKAPLSASMIKRYDEHHQDLTLLKALVRQQLPEKYKEIFFDQSKNGYAGYIDGGASQEEFYKFIKPILEKMDGTEELLVKLNREDLLRKQRTFDNGSIPHQIHLGELHAILRRQEDFYPFLKDNREKIEKILTFRIPYYVGPLARGNSRFAWMTRKSEETITPWNFEEVVDKGASAQSFIERMTNFDKNLPNEKVLPKHSLLYEYFTVYNELTKVKYVTEGMRKPAFLSGEQKKAIVDLLFKTNRKVTVKQLKEDYFKKIECFDSVEISGVEDRFNASLGTYHDLLKIIKDKDFLDNEENEDILEDIVLTLTLFEDREMIEERLKTYAHLFDDKVMKQLKRRRYTGWGRLSRKLINGIRDKQSGKTILDFLKSDGFANRNFMQLIHDDSLTFKEDIQKAQVSGQGDSLHEHIANLAGSPAIKKGILQTVKVVDELVKVMGRHKPENIVIEMARENQTTQKGQKNSRERMKRIEEGIKELGSQILKEHPVENTQLQNEKLYLYYLQNGRDMYVDQELDINRLSDYDVDHIVPQSFLKDDSIDNKVLTRSDKNRGKSDNVPSEEVVKKMKNYWRQLLNAKLITQRKFDNLTKAERGGLSELDKAGFIKRQLVETRQITKHVAQILDSRMNTKYDENDKLIREVKVITLKSKLVSDFRKDFQFYKVREINNYHHAHDAYLNAVVGTALIKKYPKLESEFVYGDYKVYDVRKMIAKSEQEIGKATAKYFFYSNIMNFFKTEITLANGEIRKRPLIETNGETGEIVWDKGRDFATVRKVLSMPQVNIVKKTEVQTGGFSKESILPKRNSDKLIARKKDWDPKKYGGFVSPTVAYSVLVVAKVEKGKSKKLKSVKELLGITIMERSSFEKNPIDFLEAKGYKEVKKDLIIKLPKYSLFELENGRKRMLASARELQKGNELALPSKYVNFLYLASHYEKLKGSPEDNEQKQLFVEQHKHYLDEIIEQISEFSKRVILADANLDKVLSAYNKHRDKPIREQAENIIHLFTLTNLGAPAAFKYFDTTIDRKQYRSTKEVLDATLIHQSITGLYETRIDLSQLGGDEGADKRTADGSEFESPKKKRKV

SEQ ID NO: 364 - protein, 1588 aa, Artificial Sequence
  Description of artificial sequence: 09. monoABE8.1_bpNLS + Y147R_Q154R_I76Y polypeptide sequence
MSEVEFSHEYWMRHALTLAKRARDEREVPVGAVLVLNNRVIGEGWNRAIGLHDPTAHAEIMALRQGGLVMQNYRLYDATLYVTFEPCVMCAGAMIHSRIGRVVFGVRNAKTGAAGSLMDVLHYPGMNHRVEITEGILADECAALLCRFFRMPRRVFNAQKKAQSSTDSGGSSGGSSGSETPGTSESATPESSGGSSGGSDKKYSIGLAIGTNSVGWAVITDEYKVPSKKFKVLGNTDRHSIKKNLIGALLFDSGETAEATRLKRTARRRYTRRKNRICYLQEIFSNEMAKVDDSFFHRLEESFLVEEDKKHERHPIFGNIVDEVAYHEKYPTIYHLRKKLVDSTDKADLRLIYLALAHMIKFRGHFLIEGDLNPDNSDVDKLFIQLVQTYNQLFEENPINASGVDAKAILSARLSKSRRLENLIAQLPGEKKNGLFGNLIALSLGLTPNFKSNFDLAEDAKLQLSKDTYDDDLDNLLAQIGDQYADLFLAAKNLSDAILLSDILRVNTEITKAPLSASMIKRYDEHHQDLTLLKALVRQQLPEKYKEIFFDQSKNGYAGYIDGGASQEEFYKFIKPILEKMDGTEELLVKLNREDLLRKQRTFDNGSIPHQIHLGELHAILRRQEDFYPFLKDNREKIEKILTFRIPYYVGPLARGNSRFAWMTRKSEETITPWNFEEVVDKGASAQSFIERMTNFDKNLPNEKVLPKHSLLYEYFTVYNELTKVKYVTEGMRKPAFLSGEQKKAIVDLLFKTNRKVTVKQLKEDYFKKIECFDSVEISGVEDRFNASLGTYHDLLKIIKDKDFLDNEENEDILEDIVLTLTLFEDREMIEERLKTYAHLFDDKVMKQLKRRRYTGWGRLSRKLINGIRDKQSGKTILDFLKSDGFANRNFMQLIHDDSLTFKEDIQKAQVSGQGDSLHEHIANLAGSPAIKKGILQTVKVVDELVKVMGRHKPENIVIEMARENQTTQKGQKNSRERMKRIEEGIKELGSQILKEHPVENTQLQNEKLYLYYLQNGRDMYVDQELDINRLSDYDVDHIVPQSFLKDDSIDNKVLTRSDKNRGKSDNVPSEEVVKKMKNYWRQLLNAKLITQRKFDNLTKAERGGLSELDKAGFIKRQLVETRQITKHVAQILDSRMNTKYDENDKLIREVKVITLKSKLVSDFRKDFQFYKVREINNYHHAHDAYLNAVVGTALIKKYPKLESEFVYGDYKVYDVRKMIAKSEQEIGKATAKYFFYSNIMNFFKTEITLANGEIRKRPLIETNGETGEIVWDKGRDFATVRKVLSMPQVNIVKKTEVQTGGFSKESILPKRNSDKLIARKKDWDPKKYGGFVSPTVAYSVLVVAKVEKGKSKKLKSVKELLGITIMERSSFEKNPIDFLEAKGYKEVKKDLIIKLPKYSLFELENGRKRMLASARELQKGNELALPSKYVNFLYLASHYEKLKGSPEDNEQKQLFVEQHKHYLDEIIEQISEFSKRVILADANLDKVLSAYNKHRDKPIREQAENIIHLFTLTNLGAPAAFKYFDTTIDRKQYRSTKEVLDATLIHQSITGLYETRIDLSQLGGDEGADKRTADGSEFESPKKKRKV

SEQ ID NO: 365 - protein, 1588 aa, Artificial Sequence
  Description of artificial sequence: 10. monoABE8.1_bpNLS + Y147R_Q154R_T166R polypeptide sequence
MSEVEFSHEYWMRHALTLAKRARDEREVPVGAVLVLNNRVIGEGWNRAIGLHDPTAHAEIMALRQGGLVMQNYRLIDATLYVTFEPCVMCAGAMIHSRIGRVVFGVRNAKTGAAGSLMDVLHYPGMNHRVEITEGILADECAALLCRFFRMPRRVFNAQKKAQSSRDSGGSSGGSSGSETPGTSESATPESSGGSSGGSDKKYSIGLAIGTNSVGWAVITDEYKVPSKKFKVLGNTDRHSIKKNLIGALLFDSGETAEATRLKRTARRRYTRRKNRICYLQEIFSNEMAKVDDSFFHRLEESFLVEEDKKHERHPIFGNIVDEVAYHEKYPTIYHLRKKLVDSTDKADLRLIYLALAHMIKFRGHFLIEGDLNPDNSDVDKLFIQLVQTYNQLFEENPINASGVDAKAILSARLSKSRRLENLIAQLPGEKKNGLFGNLIALSLGLTPNFKSNFDLAEDAKLQLSKDTYDDDLDNLLAQIGDQYADLFLAAKNLSDAILLSDILRVNTEITKAPLSASMIKRYDEHHQDLTLLKALVRQQLPEKYKEIFFDQSKNGYAGYIDGGASQEEFYKFIKPILEKMDGTEELLVKLNREDLLRKQRTFDNGSIPHQIHLGELHAILRRQEDFYPFLKDNREKIEKILTFRIPYYVGPLARGNSRFAWMTRKSEETITPWNFEEVVDKGASAQSFIERMTNFDKNLPNEKVLPKHSLLYEYFTVYNELTKVKYVTEGMRKPAFLSGEQKKAIVDLLFKTNRKVTVKQLKEDYFKKIECFDSVEISGVEDRFNASLGTYHDLLKIIKDKDFLDNEENEDILEDIVLTLTLFEDREMIEERLKTYAHLFDDKVMKQLKRRRYTGWGRLSRKLINGIRDKQSGKTILDFLKSDGFANRNFMQLIHDDSLTFKEDIQKAQVSGQGDSLHEHIANLAGSPAIKKGILQTVKVVDELVKVMGRHKPENIVIEMARENQTTQKGQKNSRERMKRIEEGIKELGSQILKEHPVENTQLQNEKLYLYYLQNGRDMYVDQELDINRLSDYDVDHIVPQSFLKDDSIDNKVLTRSDKNRGKSDNVPSEEVVKKMKNYWRQLLNAKLITQRKFDNLTKAERGGLSELDKAGFIKRQLVETRQITKHVAQILDSRMNTKYDENDKLIREVKVITLKSKLVSDFRKDFQFYKVREINNYHHAHDAYLNAVVGTALIKKYPKLESEFVYGDYKVYDVRKMIAKSEQEIGKATAKYFFYSNIMNFFKTEITLANGEIRKRPLIETNGETGEIVWDKGRDFATVRKVLSMPQVNIVKKTEVQTGGFSKESILPKRNSDKLIARKKDWDPKKYGGFVSPTVAYSVLVVAKVEKGKSKKLKSVKELLGITIMERSSFEKNPIDFLEAKGYKEVKKDLIIKLPKYSLFELENGRKRMLASARELQKGNELALPSKYVNFLYLASHYEKLKGSPEDNEQKQLFVEQHKHYLDEIIEQISEFSKRVILADANLDKVLSAYNKHRDKPIREQAENIIHLFTLTNLGAPAAFKYFDTTIDRKQYRSTKEVLDATLIHQSITGLYETRIDLSQLGGDEGADKRTADGSEFESPKKKRKV

SEQ ID NO: 366 - protein, 1588 aa, Artificial Sequence
  Description of artificial sequence: 11. monoABE8.1_bpNLS + Y147T_Q154R polypeptide sequence
MSEVEFSHEYWMRHALTLAKRARDEREVPVGAVLVLNNRVIGEGWNRAIGLHDPTAHAEIMALRQGGLVMQNYRLIDATLYVTFEPCVMCAGAMIHSRIGRVVFGVRNAKTGAAGSLMDVLHYPGMNHRVEITEGILADECAALLCTFFRMPRRVFNAQKKAQSSTDSGGSSGGSSGSETPGTSESATPESSGGSSGGSDKKYSIGLAIGTNSVGWAVITDEYKVPSKKFKVLGNTDRHSIKKNLIGALLFDSGETAEATRLKRTARRRYTRRKNRICYLQEIFSNEMAKVDDSFFHRLEESFLVEEDKKHERHPIFGNIVDEVAYHEKYPTIYHLRKKLVDSTDKADLRLIYLALAHMIKFRGHFLIEGDLNPDNSDVDKLFIQLVQTYNQLFEENPINASGVDAKAILSARLSKSRRLENLIAQLPGEKKNGLFGNLIALSLGLTPNFKSNFDLAEDAKLQLSKDTYDDDLDNLLAQIGDQYADLFLAAKNLSDAILLSDILRVNTEITKAPLSASMIKRYDEHHQDLTLLKALVRQQLPEKYKEIFFDQSKNGYAGYIDGGASQEEFYKFIKPILEKMDGTEELLVKLNREDLLRKQRTFDNGSIPHQIHLGELHAILRRQEDFYPFLKDNREKIEKILTFRIPYYVGPLARGNSRFAWMTRKSEETITPWNFEEVVDKGASAQSFIERMTNFDKNLPNEKVLPKHSLLYEYFTVYNELTKVKYVTEGMRKPAFLSGEQKKAIVDLLFKTNRKVTVKQLKEDYFKKIECFDSVEISGVEDRFNASLGTYHDLLKIIKDKDFLDNEENEDILEDIVLTLTLFEDREMIEERLKTYAHLFDDKVMKQLKRRRYTGWGRLSRKLINGIRDKQSGKTILDFLKSDGFANRNFMQLIHDDSLTFKEDIQKAQVSGQGDSLHEHIANLAGSPAIKKGILQTVKVVDELVKVMGRHKPENIVIEMARENQTTQKGQKNSRERMKRIEEGIKELGSQILKEHPVENTQLQNEKLYLYYLQNGRDMYVDQELDINRLSDYDVDHIVPQSFLKDDSIDNKVLTRSDKNRGKSDNVPSEEVVKKMKNYWRQLLNAKLITQRKFDNLTKAERGGLSELDKAGFIKRQLVETRQITKHVAQILDSRMNTKYDENDKLIREVKVITLKSKLVSDFRKDFQFYKVREINNYHHAHDAYLNAVVGTALIKKYPKLESEFVYGDYKVYDVRKMIAKSEQEIGKATAKYFFYSNIMNFFKTEITLANGEIRKRPLIETNGETGEIVWDKGRDFATVRKVLSMPQVNIVKKTEVQTGGFSKESILPKRNSDKLIARKKDWDPKKYGGFVSPTVAYSVLVVAKVEKGKSKKLKSVKELLGITIMERSSFEKNPIDFLEAKGYKEVKKDLIIKLPKYSLFELENGRKRMLASARELQKGNELALPSKYVNFLYLASHYEKLKGSPEDNEQKQLFVEQHKHYLDEIIEQISEFSKRVILADANLDKVLSAYNKHRDKPIREQAENIIHLFTLTNLGAPAAFKYFDTTIDRKQYRSTKEVLDATLIHQSITGLYETRIDLSQLGGDEGADKRTADGSEFESPKKKRKV

SEQ ID NO: 367 - protein, 1588 aa, Artificial Sequence
  Description of artificial sequence: 12. monoABE8.1_bpNLS + Y147T_Q154S polypeptide sequence
MSEVEFSHEYWMRHALTLAKRARDEREVPVGAVLVLNNRVIGEGWNRAIGLHDPTAHAEIMALRQGGLVMQNYRLIDATLYVTFEPCVMCAGAMIHSRIGRVVFGVRNAKTGAAGSLMDVLHYPGMNHRVEITEGILADECAALLCTFFRMPRSVFNAQKKAQSSTDSGGSSGGSSGSETPGTSESATPESSGGSSGGSDKKYSIGLAIGTNSVGWAVITDEYKVPSKKFKVLGNTDRHSIKKNLIGALLFDSGETAEATRLKRTARRRYTRRKNRICYLQEIFSNEMAKVDDSFFHRLEESFLVEEDKKHERHPIFGNIVDEVAYHEKYPTIYHLRKKLVDSTDKADLRLIYLALAHMIKFRGHFLIEGDLNPDNSDVDKLFIQLVQTYNQLFEENPINASGVDAKAILSARLSKSRRLENLIAQLPGEKKNGLFGNLIALSLGLTPNFKSNFDLAEDAKLQLSKDTYDDDLDNLLAQIGDQYADLFLAAKNLSDAILLSDILRVNTEITKAPLSASMIKRYDEHHQDLTLLKALVRQQLPEKYKEIFFDQSKNGYAGYIDGGASQEEFYKFIKPILEKMDGTEELLVKLNREDLLRKQRTFDNGSIPHQIHLGELHAILRRQEDFYPFLKDNREKIEKILTFRIPYYVGPLARGNSRFAWMTRKSEETITPWNFEEVVDKGASAQSFIERMTNFDKNLPNEKVLPKHSLLYEYFTVYNELTKVKYVTEGMRKPAFLSGEQKKAIVDLLFKTNRKVTVKQLKEDYFKKIECFDSVEISGVEDRFNASLGTYHDLLKIIKDKDFLDNEENEDILEDIVLTLTLFEDREMIEERLKTYAHLFDDKVMKQLKRRRYTGWGRLSRKLINGIRDKQSGKTILDFLKSDGFANRNFMQLIHDDSLTFKEDIQKAQVSGQGDSLHEHIANLAGSPAIKKGILQTVKVVDELVKVMGRHKPENIVIEMARENQTTQKGQKNSRERMKRIEEGIKELGSQILKEHPVENTQLQNEKLYLYYLQNGRDMYVDQELDINRLSDYDVDHIVPQSFLKDDSIDNKVLTRSDKNRGKSDNVPSEEVVKKMKNYWRQLLNAKLITQRKFDNLTKAERGGLSELDKAGFIKRQLVETRQITKHVAQILDSRMNTKYDENDKLIREVKVITLKSKLVSDFRKDFQFYKVREINNYHHAHDAYLNAVVGTALIKKYPKLESEFVYGDYKVYDVRKMIAKSEQEIGKATAKYFFYSNIMNFFKTEITLANGEIRKRPLIETNGETGEIVWDKGRDFATVRKVLSMPQVNIVKKTEVQTGGFSKESILPKRNSDKLIARKKDWDPKKYGGFVSPTVAYSVLVVAKVEKGKSKKLKSVKELLGITIMERSSFEKNPIDFLEAKGYKEVKKDLIIKLPKYSLFELENGRKRMLASARELQKGNELALPSKYVNFLYLASHYEKLKGSPEDNEQKQLFVEQHKHYLDEIIEQISEFSKRVILADANLDKVLSAYNKHRDKPIREQAENIIHLFTLTNLGAPAAFKYFDTTIDRKQYRSTKEVLDATLIHQSITGLYETRIDLSQLGGDEGADKRTADGSEFESPKKKRKV

SEQ ID NO: 368 - protein, 1588 aa, Artificial Sequence
  Description of artificial sequence: 13. monoABE8.1_bpNLS + H123Y123H_Y147R_Q154R_I76Y polypeptide sequence
MSEVEFSHEYWMRHALTLAKRARDEREVPVGAVLVLNNRVIGEGWNRAIGLHDPTAHAEIMALRQGGLVMQNYRLYDATLYVTFEPCVMCAGAMIHSRIGRVVFGVRNAKTGAAGSLMDVLHHPGMNHRVEITEGILADECAALLCRFFRMPRRVFNAQKKAQSSTDSGGSSGGSSGSETPGTSESATPESSGGSSGGSDKKYSIGLAIGTNSVGWAVITDEYKVPSKKFKVLGNTDRHSIKKNLIGALLFDSGETAEATRLKRTARRRYTRRKNRICYLQEIFSNEMAKVDDSFFHRLEESFLVEEDKKHERHPIFGNIVDEVAYHEKYPTIYHLRKKLVDSTDKADLRLIYLALAHMIKFRGHFLIEGDLNPDNSDVDKLFIQLVQTYNQLFEENPINASGVDAKAILSARLSKSRRLENLIAQLPGEKKNGLFGNLIALSLGLTPNFKSNFDLAEDAKLQLSKDTYDDDLDNLLAQIGDQYADLFLAAKNLSDAILLSDILRVNTEITKAPLSASMIKRYDEHHQDLTLLKALVRQQLPEKYKEIFFDQSKNGYAGYIDGGASQEEFYKFIKPILEKMDGTEELLVKLNREDLLRKQRTFDNGSIPHQIHLGELHAILRRQEDFYPFLKDNREKIEKILTFRIPYYVGPLARGNSRFAWMTRKSEETITPWNFEEVVDKGASAQSFIERMTNFDKNLPNEKVLPKHSLLYEYFTVYNELTKVKYVTEGMRKPAFLSGEQKKAIVDLLFKTNRKVTVKQLKEDYFKKIECFDSVEISGVEDRFNASLGTYHDLLKIIKDKDFLDNEENEDILEDIVLTLTLFEDREMIEERLKTYAHLFDDKVMKQLKRRRYTGWGRLSRKLINGIRDKQSGKTILDFLKSDGFANRNFMQLIHDDSLTFKEDIQKAQVSGQGDSLHEHIANLAGSPAIKKGILQTVKVVDELVKVMGRHKPENIVIEMARENQTTQKGQKNSRERMKRIEEGIKELGSQILKEHPVENTQLQNEKLYLYYLQNGRDMYVDQELDINRLSDYDVDHIVPQSFLKDDSIDNKVLTRSDKNRGKSDNVPSEEVVKKMKNYWRQLLNAKLITQRKFDNLTKAERGGLSELDKAGFIKRQLVETRQITKHVAQILDSRMNTKYDENDKLIREVKVITLKSKLVSDFRKDFQFYKVREINNYHHAHDAYLNAVVGTALIKKYPKLESEFVYGDYKVYDVRKMIAKSEQEIGKATAKYFFYSNIMNFFKTEITLANGEIRKRPLIETNGETGEIVWDKGRDFATVRKVLSMPQVNIVKKTEVQTGGFSKESILPKRNSDKLIARKKDWDPKKYGGFVSPTVAYSVLVVAKVEKGKSKKLKSVKELLGITIMERSSFEKNPIDFLEAKGYKEVKKDLIIKLPKYSLFELENGRKRMLASARELQKGNELALPSKYVNFLYLASHYEKLKGSPEDNEQKQLFVEQHKHYLDEIIEQISEFSKRVILADANLDKVLSAYNKHRDKPIREQAENIIHLFTLTNLGAPAAFKYFDTTIDRKQYRSTKEVLDATLIHQSITGLYETRIDLSQLGGDEGADKRTADGSEFESPKKKRKV

SEQ ID NO: 369 - protein, 1588 aa, Artificial Sequence
  Description of artificial sequence: 14. monoABE8.1_bpNLS + V82S + Q154R polypeptide sequence
MSEVEFSHEYWMRHALTLAKRARDEREVPVGAVLVLNNRVIGEGWNRAIGLHDPTAHAEIMALRQGGLVMQNYRLIDATLYSTFEPCVMCAGAMIHSRIGRVVFGVRNAKTGAAGSLMDVLHYPGMNHRVEITEGILADECAALLCYFFRMPRRVFNAQKKAQSSTDSGGSSGGSSGSETPGTSESATPESSGGSSGGSDKKYSIGLAIGTNSVGWAVITDEYKVPSKKFKVLGNTDRHSIKKNLIGALLFDSGETAEATRLKRTARRRYTRRKNRICYLQEIFSNEMAKVDDSFFHRLEESFLVEEDKKHERHPIFGNIVDEVAYHEKYPTIYHLRKKLVDSTDKADLRLIYLALAHMIKFRGHFLIEGDLNPDNSDVDKLFIQLVQTYNQLFEENPINASGVDAKAILSARLSKSRRLENLIAQLPGEKKNGLFGNLIALSLGLTPNFKSNFDLAEDAKLQLSKDTYDDDLDNLLAQIGDQYADLFLAAKNLSDAILLSDILRVNTEITKAPLSASMIKRYDEHHQDLTLLKALVRQQLPEKYKEIFFDQSKNGYAGYIDGGASQEEFYKFIKPILEKMDGTEELLVKLNREDLLRKQRTFDNGSIPHQIHLGELHAILRRQEDFYPFLKDNREKIEKILTFRIPYYVGPLARGNSRFAWMTRKSEETITPWNFEEVVDKGASAQSFIERMTNFDKNLPNEKVLPKHSLLYEYFTVYNELTKVKYVTEGMRKPAFLSGEQKKAIVDLLFKTNRKVTVKQLKEDYFKKIECFDSVEISGVEDRFNASLGTYHDLLKIIKDKDFLDNEENEDILEDIVLTLTLFEDREMIEERLKTYAHLFDDKVMKQLKRRRYTGWGRLSRKLINGIRDKQSGKTILDFLKSDGFANRNFMQLIHDDSLTFKEDIQKAQVSGQGDSLHEHIANLAGSPAIKKGILQTVKVVDELVKVMGRHKPENIVIEMARENQTTQKGQKNSRERMKRIEEGIKELGSQILKEHPVENTQLQNEKLYLYYLQNGRDMYVDQELDINRLSDYDVDHIVPQSFLKDDSIDNKVLTRSDKNRGKSDNVPSEEVVKKMKNYWRQLLNAKLITQRKFDNLTKAERGGLSELDKAGFIKRQLVETRQITKHVAQILDSRMNTKYDENDKLIREVKVITLKSKLVSDFRKDFQFYKVREINNYHHAHDAYLNAVVGTALIKKYPKLESEFVYGDYKVYDVRKMIAKSEQEIGKATAKYFFYSNIMNFFKTEITLANGEIRKRPLIETNGETGEIVWDKGRDFATVRKVLSMPQVNIVKKTEVQTGGFSKESILPKRNSDKLIARKKDWDPKKYGGFVSPTVAYSVLVVAKVEKGKSKKLKSVKELLGITIMERSSFEKNPIDFLEAKGYKEVKKDLIIKLPKYSLFELENGRKRMLASARELQKGNELALPSKYVNFLYLASHYEKLKGSPEDNEQKQLFVEQHKHYLDEIIEQISEFSKRVILADANLDKVLSAYNKHRDKPIREQAENIIHLFTLTNLGAPAAFKYFDTTIDRKQYRSTKEVLDATLIHQSITGLYETRIDLSQLGGDEGADKRTADGSEFESPKKKRKV

SEQ ID NO: 370 - protein, 4 aa, Artificial Sequence
  Description of artificial sequence: synthetic peptide sequence
SGGS

SEQ ID NO: 371 - protein, 24 aa, Artificial Sequence
  Description of artificial sequence: synthetic peptide sequence
SGGSSGSETPGTSESATPESSGGS

SEQ ID NO: 372 - protein, 32 aa, Artificial Sequence
  Description of artificial sequence: synthetic polypeptide sequence
SGGSSGGSSGSETPGTSESATPESSGGSSGGS

SEQ ID NO: 373 - protein, 104 aa, Artificial Sequence
  Description of artificial sequence: synthetic polypeptide sequence
GGSGGSPGSPAGSPTSTEEGTSESATPESGPGTSTEPSEGSAPGSPAGSPTSTEEGTSTEPSEGSAPGTSTEPSEGSAPGTSESATPESGPGSEPATSGGSGGS

SEQ ID NO: 374 - protein, 24 aa, Artificial Sequence
  Description of artificial sequence: synthetic peptide sequence
SGGSSGGSSGSETPGTSESATPES

SEQ ID NO: 375 - protein, 40 aa, Artificial Sequence
  Description of artificial sequence: synthetic polypeptide sequence
SGGSSGGSSGSETPGTSESATPESSGGSSGGSSGGSSGGS

SEQ ID NO: 376 - protein, 64 aa, Artificial Sequence
  Description of artificial sequence: synthetic polypeptide sequence
SGGSSGGSSGSETPGTSESATPESSGGSSGGSSGGSSGGSSGSETPGTSESATPESSGGSSGGS

SEQ ID NO: 377 - protein, 92 aa, Artificial Sequence
  Description of artificial sequence: synthetic polypeptide sequence
PGSPAGSPTSTEEGTSESATPESGPGTSTEPSEGSAPGSPAGSPTSTEEGTSTEPSEGSAPGTSTEPSEGSAPGTSESATPESGPGSEPATS

SEQ ID NO: 378 - protein, 5 aa, Artificial Sequence
  Description of artificial sequence: synthetic peptide sequence
PAPAP

SEQ ID NO: 379 - protein, 6 aa, Artificial Sequence
  Description of artificial sequence: synthetic peptide sequence
PAPAPA

SEQ ID NO: 380 - protein, 7 aa, Artificial Sequence
  Description of artificial sequence: synthetic peptide sequence
PAPAPAP

SEQ ID NO: 381 - protein, 8 aa, Artificial Sequence
  Description of artificial sequence: synthetic peptide sequence
PAPAPAPA

SEQ ID NO: 382 - protein, 9 aa, Artificial Sequence
  Description of artificial sequence: synthetic peptide sequence
PAPAPAPAP

SEQ ID NO: 383 - protein, 15 aa, Artificial Sequence
  Description of artificial sequence: synthetic peptide sequence
PAPAPAPAPAPAPAP

SEQ ID NO: 384 - protein, 21 aa, Artificial Sequence
  Description of artificial sequence: synthetic peptide sequence
PAPAPAPAPAPAPAPAPAPAP

SEQ ID NO: 385 - protein, 4 aa, Homo sapiens
  MISC_FEATURE (1)..(4): TXXH motif peptide sequence
  MISC_FEATURE (2)..(3): Xaa is any amino acid
TXXH

SEQ ID NO: 386 - DNA, 25 bp, Artificial Sequence
  Description of artificial sequence: synthetic oligonucleotide sequence
gcacccaggggttctgcagagcagg

SEQ ID NO: 387 - DNA, 21 bp, Artificial Sequence
  Description of artificial sequence: synthetic oligonucleotide sequence
gcattccactccgtccgcctc

SEQ ID NO: 388 - DNA, 21 bp, Artificial Sequence
  Description of artificial sequence: synthetic oligonucleotide sequence
gctgcaagggttggccaggct

SEQ ID NO: 389 - DNA, 21 bp, Artificial Sequence
  Description of artificial sequence: synthetic oligonucleotide sequence
ggagccagagaccagtgggca

1. A method for editing a beta globin (HBB) polynucleotide associated with sickle cell disease, the method comprising contacting a cell comprising a single nucleotide polymorphism (SNP) in the beta globin (HBB) polynucleotide with a guide RNA and a fusion protein comprising a polynucleotide programmable DNA binding domain and an adenosine deaminase domain comprising a serine (S) at amino acid position 82 of the following amino acid sequence and having at least 85% sequence identity to the following amino acid sequence MSEVEFSHEYWMRHALTLAKRARDEREVPVGAVLVLNNRVIGEGWNRAIGLHDPTAHAEI MALRQGGLVMQNYRLIDATLYVTFEPCVMCAGAMIHSRIGRVVFGVRNAKTGAAGSLMD VLHYPGMNHRVEITEGILADECAALLCYFFRMPRQVFNAQKKAQSSTD (SEQ ID NO: 2), wherein said guide RNA targets said polynucleotide programmable DNA binding domain to the SNP in the beta globin (HBB) polynucleotide.

2. The method of claim 1, wherein the adenosine deaminase domain further comprises an alteration at amino acid position 166.

3. The method of claim 2, wherein the alteration at amino acid position 166 is T166R.

4. The method of claim 1, wherein the adenosine deaminase domain further comprises one or more of the following alterations: Y147T, Y147R, Q154S, Y123H, and Q154R.

5. The method of claim 1, wherein the adenosine deaminase domain comprises a combination of alterations selected from the group consisting of:
Y147T and Q154R;
Y147T and Q154S;
Y147R and Q154S;
V82S and Q154S;
V82S and Y147R;
V82S and Q154R;
V82S and Y123H;
I76Y and V82S;
V82S, Y123H, and Y147T;
V82S, Y123H, and Y147R;
V82S, Y123H, and Q154R;
Y147R, Q154R, and Y123H;
Y147R, Q154R, and I76Y;
Y147R, Q154R, and T166R;
Y123H, Y147R, Q154R, and I76Y;
V82S, Y123H, Y147R, and Q154R; and
I76Y, V82S, Y123H, Y147R, and Q154R.

6. The method of claim 1, wherein the adenosine deaminase domain comprises V82S and T166R.

7. The method of claim 1, wherein the fusion protein comprises a heterodimer comprising the adenosine deaminase domain of claim 1 and a wild-type adenosine deaminase domain.

8. The method of claim 1, wherein the adenosine deaminase domain comprises Y147T and Q154S.

9. The method of claim 1, wherein an A•T to G•C alteration at the SNP results in expression of an HBB polypeptide having an alanine at amino acid position 6.

10. The method of claim 1, wherein the programmable DNA binding domain comprises a Cas9 domain.

11. The method of claim 10, wherein the Cas9 domain comprises a dead Cas9 (dCas9) or a nickase Cas9 (nCas9).

12. The method of claim 11, wherein the Cas9 domain is capable of programmable DNA binding and has at least 85% amino acid sequence identity to a Streptococcus pyogenes Cas9 (SpCas9), Staphylococcus aureus Cas9 (SaCas9), or a Streptococcus thermophilus 1 Cas9 (St1Cas9).

13. The method of claim 11, wherein the Cas9 domain comprises the following amino acid sequence:
(SEQ ID NO: 1)
MDKKYSIGLDIGTNSVGWAVITDEYKVPSKKFKVLGNTDRHSIKKNLIG
ALLFDSGETAEATRLKRTARRRYTRRKNRICYLQEIFSNEMAKVDDSFF
HRLEESFLVEEDKKHERHPIFGNIVDEVAYHEKYPTIYHLRKKLVDSTD
KADLRLIYLALAHMIKFRGHFLIEGDLNPDNSDVDKLFIQLVQTYNQLF
EENPINASGVDAKAILSARLSKSRRLENLIAQLPGEKKNGLFGNLIALS
LGLTPNFKSNFDLAEDAKLQLSKDTYDDDLDNLLAQIGDQYADLFLAAK
NLSDAILLSDILRVNTEITKAPLSASMIKRYDEHHQDLTLLKALVRQQL
PEKYKEIFFDQSKNGYAGYIDGGASQEEFYKFIKPILEKMDGTEELLVK
LNREDLLRKQRTEDNGSIPHQIHLGELHAILRRQEDFYPFLKDNREKIE
KILTFRIPYYVGPLARGNSRFAWMTRKSEETITPWNFEEVVDKGASAQS
FIERMTNFDKNLPNEKVLPKHSLLYEYFTVYNELTKVKYVTEGMRKPAF
LSGEQKKAIVDLLFKTNRKVTVKQLKEDYFKKIECFDSVEISGVEDRFN
ASLGTYHDLLKIIKDKDFLDNEENEDILEDIVLTLTLFEDREMIEERLK
TYAHLFDDKVMKQLKRRRYTGWGRLSRKLINGIRDKQSGKTILDFLKSD
GFANRNFMQLIHDDSLTFKEDIQKAQVSGQGDSLHEHIANLAGSPAIKK
GILQTVKVVDELVKVMGRHKPENIVIEMARENQTTQKGQKNSRERMKRI
EEGIKELGSQILKEHPVENTQLQNEKLYLYYLQNGRDMYVDQELDINRL
SDYDVDHIVPQSFLKDDSIDNKVLTRSDKNRGKSDNVPSEEVVKKMKNY
WRQLLNAKLITQRKFDNLTKAERGGLSELDKAGFIKRQLVETRQITKHV
AQILDSRMNTKYDENDKLIREVKVITLKSKLVSDFRKDFQFYKVREINN
YHHAHDAYLNAVVGTALIKKYPKLESEFVYGDYKVYDVRKMIAKSEQEI
GKATAKYFFYSNIMNFEKTEITLANGEIRKRPLIETNGETGEIVWDKGR
DFATVRKVLSMPQVNIVKKTEVQTGGFSKESILPKRNSDKLIARKKDWD
PKKYGGFDSPTVAYSVLVVAKVEKGKSKKLKSVKELLGITIMERSSFEK
NPIDFLEAKGYKEVKKDLIIKLPKYSLFELENGRKRMLASAGELQKGNE
LALPSKYVNFLYLASHYEKLKGSPEDNEQKQLFVEQHKHYLDEIIEQIS
EFSKRVILADANLDKVLSAYNKHRDKPIREQAENIIHLFTLTNLGAPAA
FKYFDTTIDRKRYTSTKEVLDATLIHQSITGLYETRIDLSQLGGD.

14. The method of claim 1, wherein the fusion protein is selected from ABE8.14-m, ABE8.15-m, ABE8.16-m, ABE8.17-m, ABE8.18-m, ABE8.19-m, ABE8.20-m, ABE8.22-m, ABE8.23-m, ABE8.24-m, ABE8.14-d, ABE8.15-d, ABE8.16-d, ABE8.17-d, ABE8.18-d, ABE8.19-d, ABE8.20-d, ABE8.22-d, ABE8.23-d, or ABE8.24-d.

15. The method of claim 1 wherein the adenosine deaminase domain comprises a truncated TadA8 comprising a deletion of 1, 2, 3, 4, 5, 6, 7, or 8 N-terminal or C-terminal amino acid residues relative to the full length TadA8.

16. The method of claim 1, wherein the adenosine deaminase domain has at least 90% sequence identity to the amino acid sequence.

17. A base editing system comprising the fusion protein of claim 1 and a guide RNA comprising a nucleic acid sequence selected from the group consisting of CUUCUCCACAGGAGUCAGAU (SEQ ID NO: 4); ACUUCUCCACAGGAGUCAGAU (SEQ ID NO: 5); and GACUUCUCCACAGGAGUCAGAU (SEQ ID NO: 6).

18. A method for editing a beta globin (HBB) polynucleotide associated with sickle cell disease, the method comprising contacting a cell comprising a single nucleotide polymorphism (SNP) in the beta globin (HBB) polynucleotide with a guide RNA and a fusion protein comprising a polynucleotide programmable DNA binding domain comprising the following amino acid sequence:
EIGKATAKYFFYSNIMNFFKTEITLANGEIRKRPLIETNGETGEIVWDKGRDFATVRKVLSM PQVNIVKKTEVQTGGFSKESILPKRNSDKLIARKKDWDPKKYGGFMQPTVAYSVLVVAKV EKGKSKKLKSVKELLGITIMERSSFEKNPIDFLEAKGYKEVKKDLIIKLPKYSLFELENGRKR MLASAKFLQKGNELALPSKYVNFLYLASHYEKLKGSPEDNEQKQLFVEQHKHYLDEIIEQI SEFSKRVILADANLDKVLSAYNKHRDKPIREQAENIIHLFTLTNLGAPRAFKYFDTTIARKEY RSTKEVLDATLIHQSITGLYETRIDLSQLGGDGGSGGSGGSGGSGGSGGSGGMDKKYSIGL AIGTNSVGWAVITDEYKVPSKKFKVLGNTDRHSIKKNLIGALLFDSGETAEATRLKRTARR RYTRRKNRICYLQEIFSNEMAKVDDSFFHRLEESFLVEEDKKHERHPIFGNIVDEVAYHEKY PTIYHLRKKLVDSTDKADLRLIYLALAHMIKFRGHFLIEGDLNPDNSDVDKLFIQLVQTYNQ LFEENPINASGVDAKAILSARLSKSRRLENLIAQLPGEKKNGLFGNLIALSLGLTPNFKSNFD LAEDAKLQLSKDTYDDDLDNLLAQIGDQYADLFLAAKNLSDAILLSDILRVNTEITKAPLSA SMIKRYDEHHQDLTLLKALVRQQLPEKYKEIFFDQSKNGYAGYIDGGASQEEFYKFIKPILE KMDGTEELLVKLNREDLLRKQRTFDNGSIPHQIHLGELHAILRRQEDFYPFLKDNREKIEKI LTFRIPYYVGPLARGNSRFAWMTRKSEETITPWNFEEVVDKGASAQSFIERMTNFDKNLPN EKVLPKHSLLYEYFTVYNELTKVKYVTEGMRKPAFLSGEQKKAIVDLLFKTNRKVTVKQL KEDYEKKIECFDSVEISGVEDRFNASLGTYHDLLKIIKDKDFLDNEENEDILEDIVLTLTLFED REMIEERLKTYAHLFDDKVMKQLKRRRYTGWGRLSRKLINGIRDKQSGKTILDFLKSDGEA NRNFMQLIHDDSLTFKEDIQKAQVSGQGDSLHEHIANLAGSPAIKKGILQTVKVVDELVKV MGRHKPENIVIEMARENQTTQKGQKNSRERMKRIEEGIKELGSQILKEHPVENTQLQNEKL YLYYLQNGRDMYVDQELDINRLSDYDVDHIVPQSFLKDDSIDNKVLTRSDKNRGKSDNVP SEEVVKKMKNYWRQLLNAKLITQRKFDNLTKAERGGLSELDKAGFIKRQLVETRQITKHV AQILDSRMNTKYDENDKLIREVKVITLKSKLVSDFRKDFQFYKVREINNYHHAHDAYLNA VVGTALIKKYPKLESEFVYGDYKVYDVRKMIAKSEQEGADKRTADGSEFESPKKKRKV (SEQ ID NO: 3), and at an adenosine deaminase domain comprising a serine (S) at amino acid position 82 of the following amino acid sequence and having at least 85% sequence identity to the following amino acid sequence
MSEVEFSHEYWMRHALTLAKRARDEREVPVGAVLVLNNRVIGEGWNRAIGLHDPTAHAEI MALRQGGLVMQNYRLIDATLYVTFEPCVMCAGAMIHSRIGRVVFGVRNAKTGAAGSLMD VLHYPGMNHRVEITEGILADECAALLCYFFRMPRQVFNAQKKAQSSTD (SEQ ID NO: 2).

19. A cell produced by introducing into the cell, or a progenitor thereof:
a fusion protein, or a polynucleotide encoding said fusion protein, to said cell, wherein said fusion protein comprises a polynucleotide programmable DNA binding domain and an adenosine deaminase domain described in claim 1; and
one or more guide polynucleotides that target the fusion protein to effect an A•T to G•C alteration of the SNP in the HBB polynucleotide.

20. The cell of claim 19, wherein the cell produced is a hematopoietic stem cell, a common myeloid progenitor, proerythroblast, erythroblast, reticulocyte, or erythrocyte.

21. The cell of claim 19, wherein the cell is a mammalian cell or a human cell.

22. A method of treating sickle cell disease in a subject comprising administering to said subject the cell of claim 19.

23. An isolated cell or population of cells propagated or expanded from the cell of claim 19.

24. A method of producing a red blood cell, or progenitor thereof, comprising:
(a) introducing into a red blood cell progenitor comprising an HBB polynucleotide associated with sickle cell disease:
i) a fusion protein, or a polynucleotide encoding said fusion protein, wherein said fusion protein comprises a polynucleotide-programmable nucleotide-binding domain and an adenosine deaminase domain described in claim 1; and
ii) one or more guide polynucleotides, wherein said one or more guide polynucleotides target said fusion protein to effect an A•T to G•C alteration of an SNP in the HBB polynucleotide; and
(b) differentiating the red blood cell progenitor into a red blood cell.

25. A method for treating sickle cell disease (SCD) in a subject, the method comprising: administering to the subject the fusion protein described in claim 1, or a polynucleotide encoding the fusion protein; and a guide polynucleotide to target the fusion protein to effect an A•T to G•C alteration of a single nucleotide polymorphism (SNP) associated with SCD, thereby treating SCD in the subject.

26. The method of claim 25, wherein the guide polynucleotide is a guide RNA.

27. The method of claim 26, wherein the alteration of the SNP replaces a target nucleobase with a non-wild type nucleobase, and wherein the alteration of the target nucleobase ameliorates symptoms of sickle cell disease.

28. A pharmaceutical composition comprising a base editing system comprising the fusion protein of claim 1, a guide RNA, and a pharmaceutically acceptable carrier, vehicle, or excipient.

29. A base editor system comprising a fusion protein comprising a polynucleotide programmable DNA binding domain and an adenosine deaminase domain comprising a serine (S) at amino acid position 82 of the following amino acid sequence and having at least 85% sequence identity to the following amino acid sequence
MSEVEFSHEYWMRHALTLAKRARDEREVPVGAVLVLNNRVIGEGWNRAIGLHDPTAHAEI MALRQGGLVMQNYRLIDATLYVTFEPCVMCAGAMIHSRIGRVVFGVRNAKTGAAGSLMD VLHYPGMNHRVEITEGILADECAALLCYFFRMPRQVFNAQKKAQSSTD (SEQ ID NO: 2) and a guide RNA, wherein said guide RNA targets said fusion protein to effect an alteration of a single nucleotide polymorphism (SNP) in a beta globin (HBB) polynucleotide.

30. The base editor system of claim 29, wherein the programmable DNA binding domain comprises the following amino acid sequence:
(SEQ ID NO: 3)
EIGKATAKYFFYSNIMNFFKTEITLANGEIRKRPLIETNGETGEIVWDK
GRDFATVRKVLSMPQVNIVKKTEVQTGGFSKESILPKRNSDKLIARKKD
WDPKKYGGFMQPTVAYSVLVVAKVEKGKSKKLKSVKELLGITIMERSSF
EKNPIDFLEAKGYKEVKKDLIIKLPKYSLFELENGRKRMLASAKFLQKG
NELALPSKYVNFLYLASHYEKLKGSPEDNEQKQLFVEQHKHYLDEIIEQ
ISEFSKRVILADANLDKVLSAYNKHRDKPIREQAENIIHLFTLTNLGAP
RAFKYFDTTIARKEYRSTKEVLDATLIHQSITGLYETRIDLSQLGGDGG
SGGSGGSGGSGGSGGSGGMDKKYSIGLAIGTNSVGWAVITDEYKVPSKK
FKVLGNTDRHSIKKNLIGALLFDSGETAEATRLKRTARRRYTRRKNRIC
YLQEIFSNEMAKVDDSFFHRLEESFLVEEDKKHERHPIFGNIVDEVAYH
EKYPTIYHLRKKLVDSTDKADLRLIYLALAHMIKFRGHFLIEGDLNPDN
SDVDKLFIQLVQTYNQLFEENPINASGVDAKAILSARLSKSRRLENLIA
QLPGEKKNGLFGNLIALSLGLTPNFKSNFDLAEDAKLQLSKDTYDDDLD
NLLAQIGDQYADLFLAAKNLSDAILLSDILRVNTEITKAPLSASMIKRY
DEHHQDLTLLKALVRQQLPEKYKEIFFDQSKNGYAGYIDGGASQEEFYK
FIKPILEKMDGTEELLVKLNREDLLRKQRTFDNGSIPHQIHLGELHAIL
RRQEDFYPFLKDNREKIEKILTFRIPYYVGPLARGNSRFAWMTRKSEET
ITPWNFEEVVDKGASAQSFIERMTNFDKNLPNEKVLPKHSLLYEYFTVY
NELTKVKYVTEGMRKPAFLSGEQKKAIVDLLFKTNRKVTVKQLKEDYFK
KIECFDSVEISGVEDRFNASLGTYHDLLKIIKDKDFLDNEENEDILEDI
VLTLTLFEDREMIEERLKTYAHLFDDKVMKQLKRRRYTGWGRLSRKLIN
GIRDKQSGKTILDFLKSDGFANRNFMQLIHDDSLTFKEDIQKAQVSGQG
DSLHEHIANLAGSPAIKKGILQTVKVVDELVKVMGRHKPENIVIEMARE
NQTTQKGQKNSRERMKRIEEGIKELGSQILKEHPVENTQLQNEKLYLYY
LQNGRDMYVDQELDINRLSDYDVDHIVPQSFLKDDSIDNKVLTRSDKNR
GKSDNVPSEEVVKKMKNYWRQLLNAKLITQRKFDNLTKAERGGLSELDK
AGFIKRQLVETRQITKHVAQILDSRMNTKYDENDKLIREVKVITLKSKL
VSDFRKDFQFYKVREINNYHHAHDAYLNAVVGTALIKKYPKLESEFVYG
DYKVYDVRKMIAKSEQEGADKRTADGSEFESPKKKRK.
